(19) United States
(12) Patent Application Publication
(10) Pub. No.: US 2022/0333101 A1
(43) Pub. Date: Oct. 20, 2022

(54) COMPOSITIONS, SYSTEMS, AND METHODS FOR GENOME EDITING

(71) Applicant: INARI AGRICULTURE TECHNOLOGY, INC., Cambridge, MA (US)

(72) Inventors: Adam Patrick Joyce, Stow, MA (US); Michael Andreas Kock, Rheinfelden (DE); Hannah Pham, Somerville, MA (US)

(21) Appl. No.: 17/810,042

(22) Filed: Jun. 30, 2022

Related U.S. Application Data
(63) Continuation-in-part of application No. 16/557,566, filed on Aug. 30, 2019.
(60) Provisional application No. 62/725,910, filed on Aug. 31, 2018.

(51) Int. Cl. C12N 15/11; C12N 9/22; C12N 15/82; C12N 15/90

(52) U.S. Cl. CPC C12N 15/11; C12N 9/22; C12N 15/8213; C12N 15/907; C12N 2310/20; C12N 2800/80

(57) ABSTRACT

This disclosure provides compositions that include a polynucleotide including or encoding a Cas12a tracrRNA, and methods for their use in sequence-specific genome editing, especially of eukaryotic genomic sequences. In particular, this disclosure provides Cas12a tracrRNA-containing compositions and methods for their use in Cas12a-mediated editing of a target sequence, wherein the editing efficiency is increased in comparison to controls lacking the Cas12a tracrRNA.

### REFERENCE TO RELATED APPLICATIONS AND

[0001] This application is a continuation-in-part of U.S. patent application Ser. No. 16/557,566 filed 30 Aug. 2019, which claims benefit of priority to U.S. Provisional Patent Application No. 62/725,910 filed 31 Aug. 2018, which is incorporated herein by reference in its entirety.

### INCORPORATION OF SEQUENCE LISTING

[0002] A sequence listing containing the file named “P13469US04_5 T25.txt” which is 735,717 bytes (measured in MS-Windows®), comprises 241 biological sequences, and was created on Jun. 30, 2022, is electronically filed with the USPTO, and is herein incorporated by reference in its entirety.

### FIELD

[0003] Aspects of this disclosure relate to biotechnology, in particular compositions and methods for genome editing.

### BACKGROUND

[0004] Recent advances in genome editing technologies have provided opportunities for precise modification of the genome in many types of organisms, including plants and animals. For example, technologies based on genome editing proteins, such as zinc finger nucleases, TALENs, and CRISPR systems are advancing rapidly and it is now possible to target genetic changes to specific DNA sequences in the genome.

[0005] CRISPR technology for editing the genes of eukaryotes is disclosed in U.S. Patent Application Publications 2016/0138008A1 (now U.S. Pat. No. 10,227,11) and US2015/0344912A1, and in U.S. Pat. Nos. 8,697,359, 8,771,945, 8,945,839, 8,999,641, 8,993,233, 8,895,308, 8,865,406, 8,889,418, 8,871,445, 8,889,356, 8,932,814, 8,795,965, and 8,906,616. Cpf1 (Cas12a) endonucleases and corresponding guide RNAs and PAM sites are disclosed in U.S. Pat. No. 9,790,490 and U.S. patent application Ser. No. 15/566,528 (national phase of PCT Application PCT/EP2016/058442, published as WO 2016/166340), now published as U.S. Patent Application Publication 2018/0282713. Other CRISPR nucleases useful for editing genomes include C2c1 and C2c3 (see Shmakov et al. (2015) Mol. Cell, 60:385-397) and CasX and CasY (see Burstein et al. (2016) Nature, doi:10.1038/nature21059). Plant RNA promoters for expressing CRISPR guide RNA and plant codon-optimized CRISPR Cas9 endonuclease are disclosed in U.S. patent application Ser. No. 15/120,110, published as U.S. Patent Application Publication 2017/0166912, national phase application claiming priority to International Patent Application PCT/US2015/018104 (published as WO 2015/131101 and claiming priority to U.S. Provisional Patent Application 61/945,700). Methods of using CRISPR technology for genome editing in plants are disclosed in in U.S. Patent Application Publications U.S. 2015/0082478A1 and U.S. 2015/0059010A1 and in International Patent Application PCT/US2015/038767 A1 (published as WO 2016/007347, claiming priority to U.S. Provisional Patent Application 62/023,246, with U.S. National Phase application U.S. Ser. No. 15/325,116, now published as U.S. Patent Application Publication 2017/0306349).

[0006] U.S. Pat. No. 9,790,490 and Zetsche et al. (2015) Cell, 163:759-771 teach that a tracrRNA is not required for nuclease cleavage activity of Cpf1 (Cas12a) effector protein complexes and suggest deletion of such sequences from engineered genome editing systems. This disclosure demonstrates that the presence of the tracrRNA as such has a beneficial effect on Cas12a editing efficiency and that the tracrRNA can be usefully employed in genome editing.

### SUMMARY

[0007] Disclosed herein are polynucleotides, DNA expression systems, compositions, and methods of use thereof, useful for genome editing.

[0008] In one aspect, the invention provides a method of tethering a functional RNA molecule to a Cas12a crRNA, the method including hybridizing (a) a functional RNA molecule including a Cas12a tracrRNA and a functional RNA moiety; and (b) a Cas12a crRNA that includes a 3′ extension capable of hybridizing with a segment of the functional RNA molecule; thereby tethering the functional RNA molecule to the Cas12a crRNA. In embodiments, the functional RNA molecule is transcribed from a DNA molecule that encodes the Cas12a tracrRNA and the functional RNA moiety; in embodiments, DNA encoding the functional RNA moiety is inserted or integrated at a native (naturally occurring) or artificial (engineered) restriction endonuclease cleavage site that is located in or adjacent to (typically within the 3′ region of) the DNA encoding the Cas12a tracrRNA. In embodiments, the crRNA 3′ extension includes nucleotides that when base-paired form about one helical turn, or at least 10 contiguous nucleotides. In embodiments, the Cas12a tracrRNA further includes a 5′ extension. The functional RNA moiety is characterized by one or more functions. Embodiments of the RNA moiety include RNA sequences for annealing to one or more polynucleotides, RNA sequences that provide structures for binding to other molecules (including proteins or small molecule ligands) or that are catalytically active, or RNA sequences that serve as directly or indirectly detectable labels. In many embodiments of the method, the Cas12a crRNA is complexed with, or is capable of complexing with, a Cas12a nuclease to form a Cas12a ribonucleoprotein complex containing the functional RNA molecule; thus, in embodiments, the method further includes the step of associating or complexing a Cas12a nuclease with a Cas12a crRNA that has (e.g., in a preceding or simultaneous step), or will have (e.g., in a subsequent step) the functional RNA molecule tethered to it. In embodiments, the Cas12a nuclease is one having a naturally occurring sequence (e.g., a native sequence of a Cas12a nuclease such as, but not limited to, LbCas12a, AsCas12a, and FnCas12a); in other embodiments, the Cas12a nuclease includes a modification, such as an amino acid sequence modification or a chemical modification.

[0009] In a related aspect, the invention provides a modified Cas12a ribonucleoprotein complex including: (a) a Cas12a nuclease; (b) a functional RNA molecule including a Cas12a tracrRNA and a functional RNA moiety; and (c) a Cas12a crRNA that includes a 3′ extension capable of hybridizing with a segment of the functional RNA molecule. In embodiments, the Cas12a nuclease is one having a naturally occurring sequence (e.g., a native sequence of a Cas12a nuclease such as, but not limited to, LbCas12a, AsCas12a, and FnCas12a); in other embodiments, the Cas12a nuclease includes a modification, such as an amino acid sequence modification or a chemical modification. In a preferred embodiment the expression and/or presence of the Cas12a tracrRNA enhances the genome editing capability of the Cas12a nuclease.

[0010] In another aspect, the invention provides a method of inserting a nucleotide sequence encoded by a donor polynucleotide at a specific locus in a target DNA, the method including: (a) annealing a donor polynucleotide to the modified Cas12a ribonucleoprotein complex of claim 12, wherein the functional RNA moiety includes an RNA sequence for annealing to the donor polynucleotide, and wherein the Cas12a crRNA includes a spacer sequence that corresponds to a specific target locus in a target DNA, thus forming a donor: RNP complex; and (b) contacting the target DNA with the donor: RNP complex; whereby the nucleotide sequence encoded by the donor polynucleotide is inserted at the specific target locus in the target DNA. In embodiments, the donor polynucleotide includes single-stranded DNA, optionally including chemical modifications. In embodiments, the donor polynucleotide includes double-stranded DNA, optionally including chemical modifications. In embodiments, the donor polynucleotide encodes coding sequence, non-coding sequence (e.g., a non-coding sequence or regulatory element that modifies expression of a target gene located at or near the target locus), or both coding and non-coding sequence. In embodiments, the target DNA is genomic DNA, e.g., genomic DNA or nuclear DNA of a eukaryote. In embodiments, the target DNA is mitochondrial or plastid DNA.

[0011] In another aspect, the invention provides a DNA expression system including (a) DNA sequence for a first promoter; and (b) operably linked and heterologous to the first promoter a DNA sequence encoding a first RNA molecule including a Cas12a tracrRNA and including a restriction endonuclease cleavage site (native or engineered) that is suitable for insertion of a sequence coding for a functional RNA moiety. In embodiments, the DNA expression system further includes: (c) optionally, a DNA sequence for a second promoter; (d) operably linked and heterologous to the first promoter or the second promoter, a DNA encoding a Cas12a crRNA that includes a 3′ extension capable of hybridizing with a segment of the first RNA molecule; and (e) optionally, a terminator; in embodiments, the first promoter and the DNA encoding the first RNA molecule, and the DNA encoding a Cas12a crRNA that includes a 3′ extension are contained in a single construct, and in other embodiments, the first promoter and the DNA encoding the first RNA molecule are contained in a first construct, and the second promoter and the DNA encoding a Cas12a crRNA that includes a 3′ extension are contained in a second construct. Where the DNA expression system is provided in a first construct and a second construct, these can be provided in a single vector or in separate vectors. In some embodiments wherein the DNA expression system includes DNA encoding a Cas12a crRNA, the first promoter drives expression of both the DNA encoding the first RNA molecule and the DNA encoding the Cas12a crRNA. In some embodiments, the Cas12a tracrRNA further includes a 5′ extension. In many embodiments of the DNA expression system, the Cas12a crRNA is capable of complexing with a Cas12a nuclease to form a Cas12a ribonucleoprotein complex. In a preferred embodiment the expression and/or presence of the Cas12a tracrRNA enhances the genome editing capability of the Cas12a nuclease.

[0012] In another aspect, the invention provides a DNA expression system including: (a) DNA sequence for a first promoter; and (b) operably linked and heterologous to the first promoter, a DNA encoding a functional RNA molecule including a Cas12a tracrRNA and a functional RNA moiety. The functional RNA moiety is characterized by one or more functions. Embodiments of the RNA moiety include RNA sequences for annealing to one or more polynucleotides, RNA sequences that provide structures for binding to other molecules (including proteins or small molecule ligands) or that are catalytically active, or RNA sequences that serve as directly or indirectly detectable labels. In embodiments, the DNA expression system further includes: (c) optionally, a DNA sequence for a second promoter; (d) operably linked and heterologous to the first promoter or the second promoter, a DNA encoding a Cas12a crRNA that includes a 3′ extension capable of hybridizing with a segment of the functional RNA molecule; and (e) optionally, a terminator. In embodiments wherein the DNA expression system includes the DNA encoding the Cas12a crRNA, the DNA expression system can be provided in a single construct (e.g., where the first promoter drives expression of both the DNA encoding the functional RNA molecule and the DNA encoding the Cas12a crRNA). In embodiments wherein the DNA expression system includes the second promoter, the second promoter can be operably linked to the DNA encoding the crRNA (e.g., in a second construct). In embodiments where the DNA expression system is provided in two constructs, these can be in a single vector or in separate vectors. In embodiments, the Cas12a tracrRNA further includes a 5′ extension. In many embodiments of the DNA expression system, the Cas12a crRNA is capable of complexing with, a Cas12a nuclease to form a Cas12a ribonucleoprotein complex containing the functional RNA molecule. In embodiments, the Cas12a nuclease is one having a naturally occurring sequence (e.g., a native sequence of a Cas12a nuclease such as, but not limited to, LbCas12a, AsCas12a, and FnCas12a); in other embodiments, the Cas12a nuclease includes a modification, such as an amino acid sequence modification or a chemical modification. In a preferred embodiment the expression and/or presence of the Cas12a tracrRNA enhances the genome editing capability of the Cas12a nuclease.

[0013] In another aspect, the invention provides an engineered system including: (a) a Cas12a nuclease; and (b) at least one engineered Cas12a crRNA, or a polynucleotide encoding the engineered Cas12a crRNA, wherein the engineered Cas12a crRNA includes (i) at least one direct repeat sequence or fragment thereof that is capable of associating with the Cas12a nuclease, and (ii) a spacer sequence that is designed to hybridize with a target sequence in a eukaryotic cell, wherein the at least one direct repeat sequence or fragment thereof is adjacent to and 5′ to the spacer sequence; and (c) a Cas12a tracrRNA including a nucleotide sequence that has at least 50% complementarity with, the nucleotide sequence of the at least one direct repeat of the engineered Cas12a crRNA. In another aspect, the invention further provides an engineered system including: (a) a Cas12a nuclease; and (b) at least one engineered Cas12a crRNA, or a polynucleotide encoding the engineered Cas12a crRNA, wherein the engineered Cas12a crRNA includes (i) at least one direct repeat sequence or fragment thereof that is capable of associating with the Cas12a nuclease, and (ii) a spacer sequence that is designed to hybridize with a target sequence in a eukaryotic cell, wherein the at least one direct repeat sequence or fragment thereof is adjacent to and 5′ to the spacer sequence; and (c) a Cas12a tracrRNA including a naturally occurring putative Cas12a tracrRNA sequence that is identified from the same genomic region as the Cas12a nuclease by at least the following steps: (i) identifying in the genomic region flanking the DNA encoding the Cas12a nuclease at least one nucleotide sequence that includes a CRISPR array including direct repeats, and (ii) identifying as a putative Cas12a tracrRNA at least one nucleotide sequence in either the sense or antisense direction in the genomic region flanking the DNA encoding the Cas12a nuclease, wherein the putative Cas12a tracrRNA has a nucleotide sequence that has at least 50% complementarity with, the nucleotide sequence of the direct repeat. In yet another aspect, the invention provides an engineered system including: (a) one or more nucleotide sequences encoding a Cas12a nuclease; and (b) one or more nucleotide sequences encoding at least one engineered Cas12a crRNA that is designed to form a complex with the Cas12a nuclease and that includes a spacer sequence designed to hybridize with a target sequence in a eukaryotic cell; and (c) one or more nucleotide sequences encoding at least one Cas12a tracrRNA. In yet another aspect, the invention provides an engineered system including: (a) a Cas12a nuclease, or one or more nucleotide sequences encoding the Cas12a nuclease; and (b) at least one engineered Cas12a crRNA designed to form a complex with the Cas12a nuclease and including a spacer sequence designed to hybridize with a target sequence in a eukaryotic cell, or one or more nucleotide sequences encoding the at least one engineered Cas12a crRNA polynucleotide; and (c) at least one tracrRNA, or one or more nucleotide sequences encoding the at least one Cas12a tracrRNA. In embodiments of these engineered systems, the engineered Cas12a crRNA, or the polynucleotide (such as a pre-processed Cas12a crRNA precursor transcript) encoding the engineered Cas12a crRNA, further includes at least one direct repeat sequence or fragment thereof capable of associating with the Cas12a nuclease, wherein the at least one direct repeat sequence or fragment thereof is adjacent to and 3′ to the spacer sequence. In embodiments of these engineered systems, the engineered Cas12a crRNA further includes a 3′ extension adjacent to the spacer sequence. In embodiments of these engineered systems, the eukaryotic cell is a non-human animal cell (e.g., a cell of an animal selected from the group consisting of invertebrates, vertebrates, insects, arthropods, mollusks, fish, reptiles, amphibians, birds, mammals, primates, and non-human primates), a human cell, a plant cell, or a fungal cell. In embodiments of these engineered systems, the eukaryotic cell is in vitro, ex vivo, or in vivo.

[0014] In another aspect, the invention provides an engineered system including one or more vectors including: (a) a first regulatory element (such as a promoter) that is heterologous to and operably linked to one or more nucleotide sequences encoding a Cas12a nuclease; and (b) a second regulatory element (such as a promoter) that is heterologous to and operably linked to one or more nucleotide sequences encoding at least one engineered Cas12a crRNA that is designed to form a complex with the Cas12a nuclease and that includes a spacer sequence designed to hybridize with a target sequence in a eukaryotic cell; and (c) a third regulatory element (such as a promoter) that is heterologous to and operably linked to one or more nucleotide sequences encoding at least one Cas12a tracrRNA; wherein components (a) and (b) and (c) are located on the same vector or on different vectors of the system. In embodiments each of the regulatory elements includes one or more expression elements (such as a promoter, an enhancer, or an intron) that is functional in a eukaryotic cell.

[0015] In another aspect, the invention provides an engineered system including one or more vectors including: (a) a first expression cassette including at least a first promoter that is heterologous to and operably linked to one or more nucleotide sequences encoding a Cas12a nuclease and—optionally—a first transcription terminator sequence; and (b) a second expression cassette including at least a second promoter that is heterologous to operably linked to one or more nucleotide sequences encoding at least one engineered Cas12a crRNA that is designed to form a complex with the Cas12a nuclease and that includes a spacer sequence designed to hybridize with a target sequence in a eukaryotic cell and—optionally—a second transcription terminator sequence; and (c) a third expression cassette including at least a third promoter that is heterologous to operably linked to one or more nucleotide sequences encoding at least one Cas12a tracrRNA and—optionally—a third transcription terminator sequence, wherein components (a) and (b) and (c) are located on the same vector or on different vectors of the system. In embodiments each of the promoters and each of the transcription terminator sequences is functional in a eukaryotic cell. In embodiments, each of the promoters is heterologous to the nucleotide sequence of which the promoter drives expression.

[0016] Further aspects of the invention are related to the engineered systems disclosed and claimed herein. These aspects include compositions (e.g., a delivery particle or a delivery liquid) that include one or more of the engineered systems. Embodiments of the compositions include those wherein the Cas12a tracrRNA is present in a molar excess, relative to the amount of Cas12a nuclease. Specific embodiments of the compositions include those wherein the Cas12a tracrRNA is present in a molar amount that is at least 10-fold greater than the molar amount of the Cas12a nuclease. Additional aspects of the invention include a method of modifying a locus of interest having a target sequence of a eukaryotic cell including delivering one or more of the engineered systems to the locus of interest, wherein the spacer sequence hybridizes with the target sequence, whereby modification of the locus of interest occurs. In embodiments of the method, the locus of interest is within a eukaryotic cell. In embodiments of the method, the eukaryotic cell is a non-human animal cell (e.g., a cell of an animal selected from the group consisting of invertebrates, vertebrates, insects, arthropods, mollusks, fish, reptiles, amphibians, birds, mammals, primates, and non-human primates), a human cell, a plant cell, or a fungal cell. In embodiments of the method, the eukaryotic cell is in vitro, ex vivo, or in vivo. In embodiments of the method, the modification of the locus of interest is an insertion of at least one nucleotide, a deletion of at least one nucleotide, a change of at least one nucleotide (such as creation of a point mutation in the locus), non-homologous end-joining (NHEJ), or homology-dependent repair (HDR).

[0017] In another aspect, the invention provides a method of editing a genetic locus with a Cas12a nuclease, including contacting DNA that includes the genetic locus with: (a) a Cas12a nuclease; and (b) an engineered Cas12a crRNA that includes a spacer sequence that is designed to hybridize with a target sequence in the genetic locus; and (c) a Cas12a tracrRNA, thereby editing the genetic locus; wherein the efficiency of editing of the genetic locus is increased compared to a control method in which the DNA that includes the genetic locus is contacted with the Cas12a nuclease and the Cas12a crRNA, but not the Cas12a tracrRNA. In embodiments, the efficiency of editing is assessed by quantifying the amount of Cas12a nuclease required to obtain a given percentage of edited target sequences (or percentage of cells containing the edited target sequences); efficiency is increased where a given editing efficiency is achieved using a lower amount of Cas12a nuclease. In embodiments of the method, the Cas12a tracrRNA is provided in a molar excess, relative to the Cas12a nuclease. In embodiments of the method, the Cas12a tracrRNA is provided in a molar amount that is at least 10-fold greater than the molar amount of the Cas12a nuclease.

[0018] In a related aspect, the invention further provides a composition for modifying a genetic locus in a eukaryotic cell, including: (a) a eukaryotic cell containing a genetic locus to be modified; and (b) a Cas12a nuclease, or a polynucleotide encoding the Cas12a nuclease; and (c) an engineered Cas12a crRNA that includes a spacer sequence corresponding to a specific sequence in the genetic locus, or a polynucleotide encoding the Cas12a crRNA; and (d) a Cas12a tracrRNA, or a polynucleotide encoding the Cas12a tracrRNA, wherein the Cas12a tracrRNA is provided in molar excess relative to the Cas12a nuclease. In embodiments of the composition, the Cas12a tracrRNA is identified from the same genomic region as the Cas12a nuclease by at least the following steps: (a) identifying in the genomic region flanking the DNA encoding the Cas12a nuclease at least one nucleotide sequence that includes a CRISPR array including direct repeats; (b) identifying as a putative Cas12a tracrRNA at least one nucleotide sequence in either the sense or antisense direction in the genomic region flanking the DNA encoding the Cas12a nuclease, wherein the putative Cas12a tracrRNA has a nucleotide sequence that has at least 50% complementarity with, the nucleotide sequence of the direct repeat. In embodiments of the composition, the Cas12a tracrRNA is present in a molar excess, relative to the Cas12a nuclease. In embodiments of the composition, the Cas12a tracrRNA is present in a molar amount that is at least 10-fold greater than the molar amount of the Cas12a nuclease.

[0019] The DNA expression systems, engineered systems, compositions, and methods disclosed herein can be employed with Cas12a nucleases or modified variants thereof. In embodiments, the Cas12a nuclease is any one of the Cas12a (“Cpf1”) nucleases disclosed in U.S. Pat. No. 9,790,490 or in U.S. patent application Ser. No. 15/566,528 (national phase entry of International Application No. PCT/EP2016/058442, published as WO2016166340), or in U.S. Pat. No. 9,896,696 which are specifically incorporated herein by reference. In embodiments, the Cas12a nuclease is a Cas12a (“Cpf1”) nuclease identified from Francisella novicida U112 (FnCas12a or “FnCpf1”), from Acidaminococcus sp. BV3L6 (AsCas12a or “AsCpf1”), or from Lachnospiraceae bacterium ND2006 (LbCas12a or “LbCpf1”), or is an orthologue thereof, such as an orthologue having at least 50% sequence identity to FnCas12a (“FnCpf1”); see, e.g., the FnCpf1 nuclease contained in the FnCpf1 locus having SEQ ID NO:211 in U.S. Pat. No. 9,790,490, incorporated herein by reference. In embodiments, a Cas12a nuclease is (a) a Cas12a nuclease identified from the genome of a bacterial species selected from the group consisting of Francisella tularensis 1, Prevotella albensis, Lachnospiraceae bacterium MC2017 1, Butyrivibrio proteoclasticus, Peregrinibacteria bacterium GW2011_GWA2_33_10, Parcubacteria bacterium GW2011_GWC2_44_17, Smithella sp. SCADC, Acidaminococcus sp. BV3L6, Lachnospiraceae bacterium MA2020, Candidatus Methanoplasma termitum, Eubacterium eligens, Moraxella bovoculi 237, Leptospira inadai, Lachnospiraceae bacterium ND2006, Porphyromonas crevioricanis 3, Prevotella disiens and Porphyromonas macacae; or (b) a Cas12a nuclease selected from the group consisting of LbCas12a, AsCas12a, FnCas12a, and a deactivated Cas12a nuclease; or (c) a Cas12a nuclease selected from the group consisting of (1) a variant LbCpf1 that differs from a wild-type LbCpf1 sequence (SEQ ID NO:135) in containing at least one point mutation selected from the group consisting of G309P, Y312F, M4741, D523N, Q531K, C930A, D937N, V954F/Q, M975L, A984E, I994L, T1006K, I1014V, V1055N/D, L1065F/Y, Y1180F, V1209G, I1229L, V801I, Y802I, D850A, E943A, and D1198A; (2) a variant AsCpf1 that differs from a wild-type AsCpf1 sequence (SEQ ID NO:134) in containing at least one point mutation selected from the group consisting of L320P, V980A, Q987N, T1004F/Q, K1035E, T1057K, D1107N, F1117Y, N1291L, D908A, E993A, and D1263A; and (3) a variant FnCpf1 that differs from a wild-type FnCpf1 sequence (SEQ ID NO:172) in containing at least one point mutation selected from the group consisting of I339P, L342F, Q588K, F1017Q, K1047E, N1118D, F1128Y, L867I, D917A, E1006A, and D1255A. In embodiments, the Cas12a nuclease includes orthologues of LbCas12a, AsCas12a, or FnCas12a. In embodiments, the Cas12a nuclease is a deactivated Cas12a nuclease, a tagged or labelled Cas12a nuclease, or a Cas12a fusion; examples are described elsewhere in this disclosure. The systems and compositions including a tracrRNA and methods of use thereof that are disclosed herein can also be employed with related Cas nucleases, including Csm nucleases, e.g., ObCsm1 (GenBank accession number OGX23684), SmCsm1 (GenBank accession number KF067988), MiCsm1 (GenBank accession number KKQ38176), or SuCsm1 (GenBank accession number KIM12007) (see, e.g., Begemann et al. (2017) bioRxiv, publicly available at dx[dot]doi[dot]org/10[dot]1101/192799), nucleases having a sequence selected from the group consisting of SEQ ID NOs:115, 137, 138, and variants thereof, such as a variant ObCsm1 that differs from a wild-type ObCsm1 sequence (SEQ ID NO:137) in containing at least one point mutation selected from the group consisting of K382N, Q393K, S925A, E933N, K943F/Q, K972L, K1064G, P670I, N671I, D727A, E939A, and D1053A.

[0020] Related aspects of the invention include eukaryotes and eukaryotic cells containing a genomic modification obtained by use of the polynucleotides, compositions, engineered systems, and methods of use thereof disclosed herein. Embodiments include non-human animals and non-human animal cells, non-human animal stem cells, human cells, human stem cells, and human somatic (non-gametic) cells; isolated tissue (e.g., nervous tissue, epithelial tissue, liver, spleen, pancreas, muscle tissue, bone, connective tissue, endocrine system tissues, and tumours) or cells (e.g., blood cells, erythrocytes, leukocytes, lymphocytes, liver cells, bone cells, immune cells, T cells, B cells, dendritic cells, and tumour cells) or cell organelles (e.g., mitochondria or chloroplasts, either isolated or contained within the eukaryotic cell, tissue, or organism) obtained from a non-human animal or from a human; engineered hybridoma cells; fungi, fungal cells, plants, plant tissue, plant cells, and seeds having such a genomic modification, e.g., a genomic modification including a heterologous nucleotide sequence encoded by a donor polynucleotide and integrated into a specific locus in the genome, wherein the donor polynucleotide is provided in a donor: RNP complex that includes the donor polynucleotide (“donor”) annealed to a modified Cas12a ribonucleoprotein (“RNP”) that includes: (a) a Cas12a nuclease; (b) a functional RNA molecule including a Cas12a tracrRNA and a functional RNA moiety, wherein the functional RNA moiety includes an RNA sequence for annealing to the donor polynucleotide and optionally an RNA sequence for annealing to the crRNA 3′ extension; and (c) a Cas12a crRNA that includes a 3′ extension capable of hybridizing with a segment of the functional RNA molecule. Additional aspects of the invention include progeny plants or progeny seeds obtained from a plant, plant cell, plant tissue, or seed having a genomic modification obtained by use of the polynucleotides, compositions, and methods of use disclosed herein. Also encompassed by the invention are raw plant materials, processed plant products, and commodity plant products obtained from a plant, plant cell, plant tissue, or seed (or from progeny plants or seeds thereof) having a genomic modification obtained by use of the polynucleotides, compositions, and methods of use disclosed herein.

### BRIEF DESCRIPTION OF THE DRAWINGS

[0021] FIG. 1 illustrates schematics of the Lachnospiraceae bacterium ND2006 Cas12a (“LbCpf1”) CRISPR locus and Cas12a tracrRNA (“putative tracrRNA”) location as described in detail in Example 1. The schematics are shown with (upper figure) and without (lower figure) the Cas4 and Cas2 components of the locus. The direct repeats (“DR”) are indicated by upright rectangles and the spacer sequences indicated by diamonds.

[0022] FIG. 2 illustrates a segment of the LbCpf1 CRISPR locus as described in detail in Example 1, showing the arrangement in a CRISPR array of the LbCpf1 direct repeats (“DR”, in bold font) (SEQ ID NO:173) flanking a spacer sequence (“spacer”, in underlined font) (SEQ ID NO:175), and illustrating the predicted crRNA (SEQ ID NO:176) processing from this CRISPR array. The DR, spacer, and predicted crRNA sequences are provided as DNA equivalents.

[0023] FIG. 3 illustrates the alignments of the reverse complement of the LbCpf1 direct repeat (DR) sequence, ATCTACACTTAGTAGAAATTATTTAATCTTTGAAAC (SEQ ID NO:5), with the LbCpf1 tracrRNA 1 (“putative tracrRNA 1”) (SEQ ID NO:2) (top, showing 52.8% identity between the two sequences) and the LbCpf1 tracrRNA 2 (“putative tracrRNA 2”) (SEQ ID NO:4) (bottom, showing 50.0% identity between the two sequences), as described in detail in Example 1.

[0024] FIG. 4 illustrates schematics of the Acidaminococcus sp. BV3L6 (“As”) Cas12a (“AsCpf1”) CRISPR locus and tracrRNA (“putative tracrRNA”) location as described in detail in Example 1. The schematics are shown with (upper figure) and without (lower figure) the Cas 1, Cas2, and Cas4 components of the locus. The direct repeats (“DR”) are indicated by upright rectangles and the spacer sequences are indicated by diamonds.

[0025] FIG. 5 illustrates a segment of the AsCpf1 CRISPR locus as described in detail in Example 1, showing the arrangement in a CRISPR array of the AsCpf1 direct repeats (“DR”, in bold font) (SEQ ID NO:176) flanking a spacer sequence (“spacer”, in underlined font) (SEQ ID NO:177), and illustrating the predicted crRNA (SEQ ID NO:178) processing from this CRISPR array. The DR, spacer, and predicted crRNA sequences are provided as DNA equivalents.

[0026] FIG. 6 illustrates the alignment of the reverse complement of the AsCpf1 direct repeat (DR) sequence, ATCTACAAGAGTAGAAATTAAAAAGGTCTTTTGAC (SEQ ID NO:8) with the AsCpf1 tracrRNA (“putative tracrRNA”) (SEQ ID NO:7), showing 51.4% identity between the two sequences as described in detail in Example 1.

[0027] FIG. 7 schematically illustrates the position (not to scale) of some of the restriction endonuclease sites within the Lb Cas12a locus as described in detail in Example 2. Endonuclease recognition and binding sites are indicated by squares; the endonuclease cleavage sites are indicated by arrowheads. “DR” indicates a direct repeat.

[0028] FIG. 8 schematically illustrates the position (not to scale) of some of the restriction endonuclease sites within the As Cas12a locus as described in detail in Example 2. Endonuclease recognition and binding sites are indicated by squares; the endonuclease cleavage sites are indicated by arrowheads. “DR” indicates a direct repeat.

[0029] FIG. 9A schematically depicts an expression cassette for expressing a Cas12a nuclease, including a promoter, coding sequence for the Cas12a nuclease, and a terminator, as described in detail in Example 3.

[0030] FIG. 9B (left) schematically depicts a DNA expression system including: (a) DNA sequence for a first promoter; (b) operably linked and heterologous to the first promoter, a DNA encoding a first RNA molecule including a Cas12a tracrRNA or putative tracrRNA and including a restriction endonuclease cleavage site that is suitable for insertion of a sequence coding for a functional RNA moiety; and (c) operably linked and heterologous to the first promoter, a DNA encoding a Cas12a crRNA that includes a 3′ extension capable of hybridizing with a segment of the first RNA molecule, as described in detail in Example 3. FIG. 9B (right) schematically depicts an alternative design wherein the DNA expression system includes (a) DNA sequence for a first promoter; (b) operably linked and heterologous to the first promoter, a DNA encoding a first RNA molecule including a Cas12a tracrRNA or putative tracrRNA and including a restriction endonuclease cleavage site that is suitable for insertion of a sequence coding for a functional RNA moiety; and (c) operably linked and heterologous to the first promoter, a DNA encoding a Cas12a crRNA including multiple guide RNAs (Cas12a crRNAs), and including a 3′ extension capable of hybridizing with a segment of the first RNA molecule, as described in detail in Example 3.

[0031] FIG. 9C (left) schematically depicts a non-limiting example of a DNA expression system including: (a) DNA sequence for a first promoter; and (b) operably linked and heterologous to the first promoter, a DNA sequence encoding a first RNA molecule including a Cas12a tracrRNA or putative tracrRNA and including a restriction endonuclease cleavage site that is suitable for insertion of a sequence coding for a functional RNA moiety, as described in detail in Example 3. FIG. 9C (right) further schematically depicts an expression construct for expressing a guide RNA (Cas12a crRNA), as described in detail in Example 3.

[0032] FIG. 10 (top) schematically depicts a DNA expression system, described in detail in Example 3, which includes: (a) DNA sequence for a first promoter; (b) operably linked and heterologous to the first promoter, DNA encoding a Cas12a nuclease; (c) a terminator; (d) a second promoter; (e) operably linked and heterologous to the second promoter, a DNA sequence encoding a functional RNA molecule including a Cas12a tracrRNA or putative tracrRNA and a functional RNA moiety; (f) an optional third promoter; (g) operably linked and heterologous to the second promoter (and to the optional third promoter, if present), a DNA encoding a guide RNA including a Cas12a crRNA that includes a 3′ extension capable of hybridizing with a segment of the functional RNA molecule; and (h) a second terminator; the 3′-most direct repeat is optional. FIG. 10 (bottom) schematically depicts a second DNA expression system, described in detail in Example 3, and similar to that shown in FIG. 10 (top), except that the guide RNA includes multiple guide RNAs, and includes a 3′ extension capable of hybridizing with a segment of the first RNA molecule; the 3′-most direct repeat is optional.

[0033] FIG. 11 (top) schematically depicts construction of the DNA encoding the functional RNA molecule by cleavage at an HphI restriction endonuclease cleavage site (“cut site”) in or adjacent to a Lb Cas12a tracrRNA (“P-tracr”) and before the LbCas12a crRNA with a 3′ extension (“E-crRNA”), insertion of DNA encoding multiple copies of an MS2 aptamer (“(n)×MS2”) as well as sequence for annealing (“rcEX”) to the crRNA 3′ extension (“EX”), and ligation to form the DNA encoding the functional RNA molecule, which can be complexed with the Cas12a nuclease to form the ribonucleoprotein depicted in FIG. 11 (bottom).

[0034] FIG. 12 depicts the results of the experiment described in Example 8 using the GD-30 crRNA. The data are provided as the fraction of edited protoplasts (the number of protoplasts containing an insertion/deletion (indel) at the predicted cleavage site, divided by the total number of protoplasts treated) versus the amount in pmoles of Cas12a nuclease used.

[0035] FIG. 13 depicts the results of the experiment using a “high-performing” Cas12a crRNA, GD-48, as described in Example 9. The data are provided as the fraction of edited protoplasts (the number of protoplasts containing an insertion/deletion (indel) at the predicted cleavage site, divided by the total number of protoplasts treated) versus the amount in pmoles of Cas12a nuclease used.

[0036] FIG. 14 depicts the results of the experiment using a “low-performing” Cas12a crRNA, GD-14, as described in Example 9. The data are provided as the fraction of edited protoplasts (the number of protoplasts containing an insertion/deletion (indel) at the predicted cleavage site, divided by the total number of protoplasts treated) versus the amount in pmoles of Cas12a nuclease used.

### DETAILED DESCRIPTION OF THE INVENTION

[0037] Unless otherwise stated, nucleic acid sequences in the text of this specification are given, when read from left to right, in the 5′ to 3′ direction. Nucleic acid sequences may be provided as DNA or as RNA, as specified; disclosure of one necessarily defines the other, as well as necessarily defines the exact complements, as is known to one of ordinary skill in the art. Where a term is provided in the singular, the inventors also contemplate aspects of the invention described by the plural of that term. As used herein, the terms “comprise,” comprises,” comprising,” “include,” “includes,” and “including” can be interchanged and are to be construed as at least having the features to which they refer while not excluding any additional unspecified features. The term “and/or” where used herein is to be taken as specific disclosure of each of the two specified features or components with or without the other. Thus, the term “and/or” as used in a phrase such as “A and/or B” herein is intended to include “A and B,” “A or B,” “A” (alone), and “B” (alone). Likewise, the term “and/or” as used in a phrase such as “A, B, and/or C” is intended to encompass each of the following embodiments: A, B, and C; A, B, or C; A or C; A or B; B or C; A and C; A and B; B and C; A (alone); B (alone); and C (alone).

[0038] By “polynucleotide” is meant a nucleic acid molecule containing multiple nucleotides and refers to “oligonucleotides” (defined here as a polynucleotide molecule of between 2-25 nucleotides in length) and polynucleotides of 26 or more nucleotides. Polynucleotides are generally described as single- or double-stranded. Where a polynucleotide contains double-stranded regions formed by intra- or intermolecular hybridization, the length of each double-stranded region is conveniently described in terms of the number of base pairs. Aspects of this invention include the use of polynucleotides or compositions containing polynucleotides; embodiments include one or more oligonucleotides or polynucleotides or a mixture of both, including single- or double-stranded RNA or single- or double-stranded DNA or double-stranded DNA/RNA hybrids or chemically modified analogues or a mixture thereof. In various embodiments, a polynucleotide includes a combination of ribonucleotides and deoxyribonucleotides (e.g., synthetic polynucleotides consisting mainly of ribonucleotides but with one or more terminal deoxyribonucleotides or synthetic polynucleotides consisting mainly of deoxyribonucleotides but with one or more terminal dideoxyribonucleotides), or includes non-canonical nucleotides such as inosine, thiouridine, or pseudouridine. In embodiments, the polynucleotide includes chemically modified nucleotides (see, e.g., Verma and Eckstein (1998) Annu. Rev. Biochem., 67:99-134); for example, the naturally occurring phosphodiester backbone of an oligonucleotide or polynucleotide can be partially or completely modified with phosphorothioate, phosphorodithioate, or methylphosphonate internucleotide linkage modifications; modified nucleoside bases or modified sugars can be used in oligonucleotide or polynucleotide synthesis; and oligonucleotides or polynucleotides can be labelled with a fluorescent moiety (e.g., fluorescein or rhodamine or a fluorescence resonance energy transfer or FRET pair of chromophore labels) or other label (e.g., biotin or an isotope). Modified nucleic acids, particularly modified RNAs, are disclosed in U.S. Pat. No. 9,464,124, incorporated by reference in its entirety herein.

[0039] “CRISPR (Clustered Regularly Interspaced Short Palindromic Repeats)/Cas (CRISPR-associated) systems,” or CRISPR systems, are adaptive defense systems originally discovered in bacteria and archaea. CRISPR systems use RNA-guided nucleases termed CRISPR-associated or “Cas” endonucleases (e.g., Cas9 or Cas12a (“Cpf1”)) to cleave foreign DNA. In atypical CRISPR/Cas system, a Cas endonuclease is directed to a target nucleotide sequence (e.g., a site in the genome that is to be sequence-edited) by sequence-specific, non-coding “guide RNAs” that target single- or double-stranded DNA sequences. In microbial hosts, CRISPR loci encode both Cas endonucleases and “CRISPR arrays” of the non-coding RNA elements that determine the specificity of the CRISPR-mediated nucleic acid cleavage.

[0040] Two classes (1 and 2) of CRISPR systems have been identified across a wide range of bacterial hosts. The well characterized class 2 CRISPR systems use a single Cas endonuclease (rather than multiple Cas proteins). One class 2 CRISPR system includes a type II Cas endonuclease such as Cas9, a CRISPR RNA (“crRNA”), and a trans-activating crRNA (“tracrRNA”). A “trans-activating crRNA” or “tracrRNA” is a trans-encoded small RNA that is partially homologous to repeats within a CRISPR array. At least in the case of Cas9 type CRISPR systems, both a tracrRNA and a crRNA are required for the CRISPR array to be processed and for the nuclease to cleave the target DNA sequence. In contrast, Cas12a type CRISPR systems have been reported to function without a tracrRNA, with the Cas12a CRISPR arrays processed into mature crRNAs without the requirement of a tracrRNA; see Zetsche et al. (2015) Cell, 163:759-771 and U.S. Pat. No. 9,790,490. The Cas9 crRNA contains a “spacer sequence”, typically an RNA sequence of about 20 nucleotides (in various embodiments this is 20, 21, 22, 23, 24, 25, or up to about 30 contiguous nucleotides in length) that corresponds to (e.g., is identical or nearly identical to, or alternatively is complementary or nearly complementary to) a target DNA sequence of about equivalent length. The Cas9 crRNA also contains a region that binds to the Cas9 tracrRNA to form a partially double-stranded structure which is cleaved by RNase III, resulting in a crRNA:tracrRNA hybrid or duplex. The crRNA:tracrRNA hybrid then directs the Cas9 endonuclease to recognize and cleave the target DNA sequence; in some examples, a tracrRNA and crRNA (e.g., a crRNA including a spacer sequence) can be included in a chimeric nucleic acid referred to as a “single guide RNA” (sgRNA).

[0041] The Cas12a (“Cpf1”) CRISPR system includes the type V endonuclease Cas12a (also known as “Cpf1”). Cas12a nucleases are characterized as having only a RuvC nuclease domain, in contrast to Cas9 nucleases which have both RuvC and HNH nuclease domains. Cas12a nucleases are generally smaller proteins than Cas9 nucleases, and can function with a smaller guide RNA (e.g., a crRNA having at least one spacer flanked by direct repeats), which are practical advantages in that the nuclease and guide RNAs are more economical to produce and potentially more easily delivered to a cell. Examples of Cas12a nucleases include AsCas12a or “AsCpf1” (from Acidaminococcus sp.) and LbCas12a or “LbCpf1” (from Lachnospiraceae bacteria). In contrast to Cas9 type CRISPR systems, Cas12a-associated (“Cpf1”-associated) CRISPR arrays have been reported to be processed into mature crRNAs without the requirement of a tracrRNA, i.e., the naturally occurring Cas12a (Cpf1) CRISPR system was reported to require only the Cas12a (Cpf1) nuclease and a Cas12a crRNA to cleave the target DNA sequence; see Zetsche et al. (2015) Cell, 163:759-771; U.S. Pat. No. 9,790,490.

[0042] The term “tracrRNA” sequence or analogous terms includes any polynucleotide sequence that has sufficient complementarity with a crRNA sequence to hybridize. Embodiments of tracrRNA sequences useful in the compositions, engineered systems, and methods provided by this disclosure include those described as a “putative transactivating crRNA” or “putative tracrRNA” in U.S. Pat. No. 9,490,490 (e.g., in FIGS. 46, 48-51, and 54 of U.S. Pat. No. 9,490,490, and SEQ IDS NO: 28, 31, 34, 40, 43, 44, 47, and 50 of U.S. Pat. No. 9,490,490) and its priority documents, all of which are incorporated by reference herein. Embodiments of methods of identifying orthologues of CRISPR-Cas system enzymes may involve identifying tracrRNA sequences in genomes of interest.

[0043] The term “Cas12a tracrRNA” as used herein means a naturally occurring Cas12a tracrRNA or an engineered derivative thereof. In a preferred embodiment, the term “Cas12a tracrRNA” refers to a naturally occurring Cas12a tracrRNA has a nucleotide sequence that includes or comprises: (a) a nucleotide sequence or region of about 60 to about 100 contiguous nucleotides that has more than 50% identity to the direct repeat (DR) or tracr mate sequence in the Cas12a crRNA, preferably also has (b) secondary structure, and preferably also has (c) a transcriptional terminator. In some embodiments, a naturally occurring Cas12a tracrRNA has a nucleotide sequence that includes or comprises: (a) a nucleotide sequence or region of about 60 to about 100 contiguous nucleotides that has more than 50% identity to the direct repeat (DR) or tracr mate sequence in the Cas12a crRNA, and preferably also has (b) secondary structure, but is not associated with a transcriptional terminator. In some embodiments, the Cas12a tracrRNA is physically associated with the corresponding Cas12a crRNA and/or with the corresponding Cas12a nuclease. In other embodiments, the Cas12a tracrRNA is not physically associated with the corresponding Cas12a crRNA and/or with the corresponding Cas12a nuclease.

[0044] A naturally occurring tracrRNA sequence can be identified from a genome as DNA sequence encoding a RNA molecule (a “putative tracrRNA”) that is predicted to be or putatively transcribed (or that may be determined to be transcribed, e.g., by RNA analysis) from a CRISPR genomic region, specifically from a locus that flanks the DNA encoding the CRISPR nuclease and that includes a predicted transcriptional terminator in the direction of transcription; is about 60 to about 100 nucleotides in length, e.g., 60-80 nucleotides, 60-85 nucleotides, 60-90 nucleotides, or 65-95 nucleotides; and is not a direct repeat in the CRISPR array, but rather has a nucleotide sequence of sufficient complementarity with a crRNA sequence to hybridize, e.g., of at least 50% identity to or at least 50% complementarity to the direct repeat in a CRISPR array. Steps for identifying tracrRNA sequences have been described, e.g., in U.S. Pat. No. 9,790,490, incorporated here by reference: “Identification of tracr sequences may relate to the following steps: Search for the direct repeats or tracr mate sequences in a database to identify a CRISPR region comprising a CRISPR enzyme. Search for homologous sequences in the CRISPR region flanking the CRISPR enzyme in both the sense and antisense directions. Look for transcriptional terminators and secondary structures. Identify any sequence that is not a direct repeat or a tracr mate sequence but has more than 50% identity to the direct repeat or tracr mate sequence as a potential tracr sequence. Take the potential tracr sequence and analyze for transcriptional terminator sequences associated therewith.” RNA sequencing can be used to further characterize such sequences identified as potential or putative tracrRNAs.

[0045] In embodiments, an engineered Cas12a tracrRNA is used in place of or as a substitute for a naturally occurring tracrRNA or putative tracrRNA identified from a genome. In embodiments, an engineered Cas12a tracrRNA is designed based on guidelines similar to those employed for identifying a naturally occurring tracrRNA or putative tracrRNA identified from a genome. In embodiments, an engineered Cas12a tracrRNA is designed to have a sequence of about 60 to about 100 ribonucleotides and to have at least 50% complementarity to the sequence of the direct repeat of the Cas12a crRNA with which the engineered Cas12a tracrRNA is meant to be used. Engineered Cas12a tracrRNAs can be expressed with any of the systems described in this disclosure, e.g., in an expression construct using any of the promoters, terminator, or other expression elements described herein.

[0046] The genomic DNA sequence targeted for editing or modification must generally be adjacent to a “protospacer adjacent motif” (“PAM”) that is specific for a given Cas endonuclease; however, PAM sequences are short and relatively non-specific, appearing throughout a given genome. CRISPR endonucleases identified from various prokaryotic species have unique PAM sequence requirements; examples of PAM sequences include 5′-NGG (Streptococcus pyogenes), 5′-NNAGAA (Streptococcus thermophilus CRISPR1), 5′-NGGNG (Streptococcus thermophilus CRISPR3), 5′-NNGRRT or 5′-NNGRR (Staphylococcus aureus Cas9, SaCas9), and 5′-NNNGATT (Neisseria meningitidis). Some endonucleases, e.g., Cas9 endonucleases, are associated with G-rich PAM sites, e.g., 5′-NGG, and perform blunt-end cleaving of the target DNA at a location three nucleotides upstream from (5′ from) the PAM site. Cas12a (Cpf1) CRISPR systems cleave the target DNA adjacent to a short T-rich PAM sequence, e.g., 5′-TTN, in contrast to the G-rich PAM sequences identified for Cas9 systems. Examples of Cas12a PAM sequences include those for the naturally occurring Acidaminococcus sp. BV3L6 Cpf1 (AsCpf1) and Lachnospiraceae bacterium ND2006 Cpf1 (LbCpf1) TTTV, where V can be A, C, or G. In some instances, Cas12a can also recognize a 5′-CTA PAM motif. Other examples of potential Cas12a PAM sequences include TTN, CTN, TCN, CCN, TTTN, TCTN, TTCN, CTTN, ATTN, TCCN, TTGN, GTTN, CCCN, CCTN, TTAN, TCGN, CTCN, ACTN, GCTN, TCAN, GCCN, and CCGN (wherein N is defined as any nucleotide). Various methods (including in silico and/or wet lab methods) for identification of the appropriate PAM sequence are known in the art and are routine, and any convenient method can be used. A PAM sequence can be identified using a PAM depletion assay. Cas12a cleaves the target DNA by introducing an offset or staggered double-strand break with a 4- or 5-nucleotide 5′ overhang, for example, cleaving a target DNA with a 5-nucleotide offset or staggered cut located 18 nucleotides downstream from (3′ from) from the PAM site on the coding strand and 23 nucleotides downstream from the PAM site on the complimentary strand; the 5-nucleotide overhang that results from such offset cleavage allows more precise genome editing by DNA insertion by homologous recombination than by insertion at blunt-end cleaved DNA. See, e.g., Zetsche et al. (2015) Cell, 163:759-771.

[0047] For the purposes of gene editing, CRISPR arrays can be designed to contain one or multiple guide RNAs designed to target a DNA sequence for editing, where the guide RNA includes at least one spacer sequence that corresponds to a specific locus of about equivalent length in the target DNA; see, for example, Cong et al. (2013) Science, 339:819-823; Ran et al. (2013) Nature Protocols, 8:2281-2308. As used herein “guide RNA” or “gRNA” refers to a nucleic acid that comprises or includes a nucleotide sequence (sometimes referred to a “spacer sequence”) that corresponds to (e.g., is identical or nearly identical to, or alternatively is complementary or nearly complementary to) a target DNA sequence (e.g., a contiguous nucleotide sequence that is to be modified) in a genome; the guide RNA functions in part to direct the CRISPR nuclease to a specific location on the genome. In embodiments, a gRNA is a CRISPR RNA (“crRNA”), such as the engineered Cas12a crRNAs described in this disclosure. For nucleases (such as a Cas9 nuclease) that require a combination of a trans-activating crRNA (“tracrRNA”) and a crRNA for the nuclease to cleave the target nucleotide sequence, the gRNA can be a tracrRNA:crRNA hybrid or duplex, or can be provided as a single guide RNA (sgRNA). At least 16 or 17 nucleotides of gRNA sequence corresponding to a target DNA sequence are required by Cas9 for DNA cleavage to occur; for Cas12a (Cpf1) at least 16 nucleotides of gRNA sequence corresponding to a target DNA sequence are needed to achieve detectable DNA cleavage and at least 18 nucleotides of gRNA sequence corresponding to a target DNA sequence were reported necessary for efficient DNA cleavage in vitro; see Zetsche et al. (2015) Cell, 163:759-771. Cas12a (Cpf1) endonuclease and corresponding guide RNAs and PAM sites are disclosed in U.S. Pat. No. 9,790,490, which is incorporated herein by reference in its entirety and particularly for its disclosure of DNA encoding Cas12a (Cpf1) endonucleases and guide RNAs and PAM sites. In practice, guide RNA sequences are generally designed to contain a spacer sequence of between 17-24 contiguous nucleotides (frequently 19, 20, or 21 nucleotides) with exact complementarity (e.g., perfect base-pairing) to the targeted gene or nucleic acid sequence; guide RNAs having spacers with less than 100% complementarity to the target sequence can be used (e.g., a gRNA with a spacer having a length of 20 nucleotides and between 1-4 mismatches to the target sequence), but this can increase the potential for off-target effects. The design of effective guide RNAs for use in plant genome editing is disclosed in U.S. Patent Application Publication 2015/0082478 A1, the entire specification of which is incorporated herein by reference. Chemically modified sgRNAs have been demonstrated to be effective in Cas9 genome editing; see, for example, Hendel et al. (2015) Nature Biotechnol., 33:985-991.

[0048] CRISPR-type genome editing has value in various aspects of agriculture research and development. CRISPR elements, e.g., CRISPR endonucleases and CRISPR single-guide RNAs, are useful in effecting genome editing without remnants of the CRISPR elements or selective genetic markers occurring in progeny. Alternatively, genome-inserted CRISPR elements are useful in plant lines adapted for multiplex genetic screening and breeding. For instance, a plant species can be created to express one or more of a CRISPR endonuclease such as a Cas12a-type endonuclease or combinations with unique PAM recognition sites. Introduction of one or more of a wide variety of CRISPR guide RNAs that interact with CRISPR endonucleases integrated into a plant genome or otherwise provided to a plant is useful for genetic editing for providing desired phenotypes or traits, for trait screening, or for trait introgression. Multiple endonucleases can be provided in expression cassettes with the appropriate promoters to allow multiple genome editing in a spatially or temporally separated fashion in either in chromosome DNA or episome DNA.

[0049] CRISPR technology for editing the genes of eukaryotes is disclosed in U.S. Patent Application Publications 2016/0138008A1 and US2015/0344912A1, and in U.S. Pat. Nos. 8,697,359, 8,771,945, 8,945,839, 8,999,641, 8,993,233, 8,895,308, 8,865,406, 8,889,418, 8,871,445, 8,889,356, 8,932,814, 8,795,965, and 8,906,616. Cas12a (Cpf1) endonuclease and corresponding guide RNAs and PAM sites are disclosed in U.S. Pat. No. 9,790,490 and U.S. patent application Ser. No. 15/566,528 (national phase of PCT Application PCT/EP2016/058442, published as WO 2016/166340). Plant RNA promoters for expressing CRISPR guide RNA and plant codon-optimized CRISPR Cas9 endonuclease are disclosed in U.S. patent application Ser. No. 15/120,110, published as U.S. Patent Application Publication 2017/0166912, national phase application claiming priority to International Patent Application PCT/US2015/018104 (published as WO 2015/131101 and claiming priority to U.S. Provisional Patent Application 61/945,700). Methods of using CRISPR technology for genome editing in plants are disclosed in in U.S. Patent Application Publications U.S. 2015/0082478A1 and U.S. 2015/0059010A1 and in International Patent Application PCT/US2015/038767 A1 (published as WO 2016/007347 and claiming priority to U.S. Provisional Patent Application 62/023,246). All of the patent publications referenced in this paragraph are incorporated herein by reference in their entirety.

[0050] Endonucleases such as Cas9 and Cas12a (Cpf1) can be provided to a cell in different forms. In an embodiment, an endonuclease is provided as a ribonucleoprotein (RNP) complex, e.g., a preassembled RNP that includes the endonuclease complexed with a polynucleotide including the gRNA or encoding a gRNA, or a preassembled RNP that includes a polynucleotide that encodes the endonuclease (and optionally encodes the gRNA, or is provided with a separate polynucleotide including the gRNA or encoding a gRNA), complexed with a protein. In embodiments, the endonuclease is a fusion protein, i.e., wherein the endonuclease is covalently bound through a peptide bond to a cell-penetrating peptide, a nuclear localization signal peptide, a chloroplast transit peptide, or a mitochondrial targeting peptide; such fusion proteins are conveniently encoded in a single nucleotide sequence, optionally including codons for linking amino acids. In embodiments, the endonuclease or a polynucleotide that encodes the endonuclease is provided as a complex with a cell-penetrating peptide or other transfecting agent. In embodiments, the endonuclease or a polynucleotide that encodes the endonuclease is complexed with, or covalently or non-covalently bound to, a further element, e.g., a carrier molecule, an antibody, an antigen, a viral movement protein, a polymer, a detectable label (e.g., a moiety detectable by fluorescence, radioactivity, or enzymatic or immunochemical reaction), a quantum dot, or a particulate or nanoparticulate. In embodiments, the endonuclease or a polynucleotide that encodes the endonuclease is provided in a solution, or is provided in a liposome, micelle, emulsion, reverse emulsion, suspension, or other mixed-phase composition. Similarly, editing complexes such as those disclosed herein (or compositions including such editing complexes) can be provided in combination with further elements (e.g., a carrier molecule, an antibody, an antigen, a viral movement protein, a polymer, a detectable label, a quantum dot, or a particulate or nanoparticulate) or provided in a suitable form (e.g., in a solution, liposome, micelle, emulsion, reverse emulsion, suspension, or other mixed-phase composition).

[0051] By “integration of heterologous sequence” is meant integration or insertion of one or more nucleotides, resulting in a sequence (including the inserted nucleotide(s) as well as at least some adjacent nucleotides of the genomic sequence flanking the site of insertion at a double-strand break effected by a CRISPR endonuclease) that is heterologous (e.g., would not otherwise or does not normally occur at the site of insertion). The term “heterologous” is also used to refer to a given sequence in relationship to another, e.g., the sequence of a donor DNA is heterologous to the sequence at the site of the double-strand break wherein the donor DNA is integrated. The term “heterologous” is also used to refer to components of a synthetic polynucleotide construct, where the components do not naturally occur together; for example, an expression cassette or construct can include a promoter to drive expression of a downstream sequence, where the promoter is heterologous to that downstream sequence. As used herein, the terms “heterologous promoter”, “heterologous terminator”, “heterologous coding sequence”, and the like refer to discrete genetic sequences such as promoters and other expression-related genetic elements (e.g., promoters, enhancers, introns, terminators, silencers, and insulators), that are not normally associated with a particular nucleic acid in nature. For example, a “promoter that is heterologous to a coding region” is a promoter that is not normally associated with the coding region in nature.

[0052] By “capable of specifically binding to” is meant an agent that binds substantially or preferentially only to a defined target (such as an oligonucleotide or polynucleotide to a specific nucleic acid). In some examples, an oligonucleotide or polynucleotide capable of specifically binding to a target nucleic acid is complementary to the target nucleic acid. However, exact complementarity is not required for specific binding. The term “capable of hybridizing” refers to the ability of two polynucleotides to hybridize or “anneal”, i.e., to form Watson-Crick base pairs; one of skill in the art would understand that the ability to hybridize requires a sufficient degree of complementarity between the two polynucleotides under given conditions (e.g., temperature) and that the degree of complementarity can be estimated using algorithms in the art.

[0053] By “complementary” is meant sequences with at least sufficient complementarity to permit enough base-paring for two nucleic acids to hybridize (for example, for a tether to hybridize with or bind to a gRNA or donor DNA), which in some examples may be under typical physiological conditions for the cell. In some examples, the oligonucleotide or polynucleotide is at least 80% complementary to the target, for example, at least 85%, 90%, 95%, 96%, 97%, 98%, 99%, or 100% complementary to the target.

[0054] A polynucleotide or polypeptide has a certain percent “sequence identity” to another polynucleotide or polypeptide, meaning that, when aligned, that percentage of bases or amino acids are the same, and in the same relative position, when comparing the two sequences. Sequence similarity can be determined in a number of different manners. To determine sequence identity, sequences can be aligned using the methods and computer programs, including BLAST, available at ncbi[dot]nlm[dot]nih[dot]gov/BLAST. See, e.g., Altschul et al. (1990) Mol. Biol., 215:403-410. Another alignment algorithm is FASTA, available in the Genetics Computing Group (GCG) package, from Madison, Wis., USA, a wholly owned subsidiary of Oxford Molecular Group, Inc. Other techniques for alignment are described in Methods in Enzymology, vol. 266: Computer Methods for Macromolecular Sequence Analysis (1996), ed. Doolittle, Academic Press, Inc., a division of Harcourt Brace & Co., San Diego, Calif., USA. Of particular interest are alignment programs that permit gaps in the sequence. The Smith-Waterman is one type of algorithm that permits gaps in sequence alignments. See Meth. Mol. Biol., 70: 173-187 (1997). Also, the GAP program using the Needleman and Wunsch alignment method can be utilized to align sequences. See Mol. Biol., 48: 443-453 (1970).

[0055] The term “operably linked” refers to a juxtaposition wherein the components so described are in a relationship permitting them to function in their intended manner. For instance, a promoter is operably linked to a coding sequence if the promoter affects its transcription or expression.

[0056] By “native” is meant naturally occurring in a genome, such as a prokaryotic or eukaryotic genome. A “native” restriction endonuclease cleavage site means a restriction endonuclease cleavage site that is found in a naturally existing genome, such as a restriction endonuclease cleavage site that is naturally found within genomic DNA encoding the tracrRNA, in contrast to an artificial or engineered restriction endonuclease cleavage site that is created through recombinant nucleic acid technology.

[0057] By “engineered” is meant artificial, synthetic, or not occurring in nature. For example, a polynucleotide that includes two DNA sequences that are heterologous to each other can be engineered or synthesized by recombinant nucleic acid techniques.

[0058] By a “complex” is meant two or more associated components, such as two or more associated nucleic acids and/or proteins. A complex may include two or more covalently linked nucleic acids and/or proteins, two or more non-covalently linked nucleic acids and/or proteins, or a combination thereof. In an example, a complex includes a nuclease (such as a Cas12a nuclease) and an appropriate crRNA; such a complex can optionally include one or more polynucleotides, such as the tracrRNA molecules described herein, donor polynucleotides, and functional RNA moieties. In some examples, a complex includes a gRNA (such as a crRNA) and a donor polynucleotide (or a template for production of a donor polynucleotide), which may be covalently or non-covalently linked. In other examples, a complex includes a nuclease and a donor DNA, which may be covalently linked. In further example, a complex includes one or more CRISPR nuclease polypeptides, a gRNA, and a donor DNA (or a template for production of donor DNA).

[0059] By “covalently linked” is meant that two elements (such as a gRNA and a tether or a gRNA and a donor DNA) are joined by a covalent bond, for example, an internucleotide linkage such as a phosphodiester bond, a phosphorothioate bond, a phosphothioate bond, or a peptide bond.

[0060] By “non-covalently linked” is meant that two elements (such as two discrete polynucleotides, or a polypeptide and a polynucleotide) interact non-covalently, for example by hydrogen bonding, such as Watson-Crick base pairing. Other non-covalent interactions include non-Watson-Crick pairing, electrostatic interactions, van der Waals forces, 7r-effects, and hydrophobic effects.

[0061] By “in vivo” is meant that the systems, compositions, and methods of this disclosure are applied to or within a living organism, such as a living intact non-human animal, a living human, or a living plant or seed. By “in vitro” is meant that the systems, compositions, and methods of this disclosure are applied to cells or tissue maintained alive independently of an intact multicellular organism, such as a living intact non-human animal, a living intact human, or a living intact plant or seed; examples of in vitro embodiments include those where the systems, compositions, and methods of this disclosure are applied to stable or transient animal or plant cell lines in culture and tissue samples in culture. In vitro embodiments further include prokaryotic cell cultures. By “ex vivo” is meant occurring in cells, tissue, or organs (e.g., blood, blood cells, T cells, liver cells or tissue, skin, bone, muscle, eggs or ovules, sperm, pollen, etc.) removed from a living non-human animal, human, or plant and at least temporarily maintained alive in culture. Ex vivo cells or tissues may be returned to a living intact multicellular organism, such as the living non-human animal, human, or plant from which the cells or tissue were originally removed. In an embodiment, the systems, compositions, and methods of this disclosure are applied to human T-cells for the purpose of generating chimeric antigen receptor T cells (“CAR-T cells”), which may be delivered to a human as a therapeutic; see, e.g., Liu et al., Frontiers Immunol., 10:456, available at doi: 10.3389/fimmu.2019.00456. Ex vivo cells or tissues may be grown into differentiated tissue or even differentiated organs, or undifferentiated tissue or callus. Ex vivo plant cells or plant tissues may be grown into intact plants.

Method of Tethering a Functional RNA Molecule to a Cas12a crRNA or a Cas12a Ribonucleoprotein

[0062] An aspect of this invention provides a method of tethering a functional RNA molecule to a Cas12a crRNA, optionally to a Cas12a ribonucleoprotein including a Cas12a nuclease and a Cas12a crRNA. In embodiments, the method includes the step of hybridizing (a) a functional RNA molecule including a Cas12a tracrRNA and a functional RNA moiety; and (b) a Cas12a crRNA that includes a 3′ extension capable of hybridizing with a segment of the functional RNA molecule; thereby tethering the functional RNA molecule to the Cas12a crRNA. In embodiments, the method includes the step of hybridizing (a) a functional RNA molecule including a Cas12a tracrRNA and a functional RNA moiety; and (b) a naturally occurring Cas12a crRNA that optionally includes a 3′ extension capable of hybridizing with a segment of the functional RNA molecule; thereby tethering the functional RNA molecule to the Cas12a crRNA. In embodiments, the method includes the step of hybridizing (a) a functional RNA molecule including a Cas12a tracrRNA and a functional RNA moiety; and (b) an engineered Cas12a crRNA that optionally includes a 3′ extension capable of hybridizing with a segment of the functional RNA molecule; thereby tethering the functional RNA molecule to the Cas12a crRNA.

[0063] Embodiments of a “Cas12a tracrRNA” include an RNA molecule having the nucleotide sequence of a naturally occurring tracrRNA identified from a native Cas12a locus. For example, a naturally occurring Cas12a tracrRNA can be identified from a genome using the techniques described by Zetsche et al. (2015) Cell, 163:759-771, and in U.S. Pat. No. 9,790,490. A naturally occurring Cas12a tracrRNA can be identified from a genome as DNA sequence encoding a RNA molecule that: is predicted to be or putatively transcribed (or that may be determined to be transcribed, e.g., by RNA analysis) from a Cas12a CRISPR genomic region, specifically from a locus that flanks the DNA encoding the Cas12a CRISPR nuclease; that preferably but not necessarily includes a predicted transcriptional terminator in the direction of transcription; that is about 60 to about 100 nucleotides in length, e.g., 60-80 nucleotides, 60-85 nucleotides, 60-90 nucleotides, or 65-95 nucleotides; and that is not a direct repeat in the Cas12a CRISPR array, but rather has a nucleotide sequence that permits the transcribed tracrRNA to hybridize to the crRNA (i.e., the transcribed tracrRNA has sufficient complementarity to a crRNA sequence to hybridize to the crRNA). In embodiments, the Cas12a tracrRNA locus is directly adjacent to the DNA encoding the Cas12a nuclease. In embodiments, there is additional genomic sequence, such as DNA sequence encoding other Cas nucleases, located between the Cas12a tracrRNA locus and the DNA encoding the Cas12a nuclease; see, e.g., FIGS. 1 and 4. In embodiments, the transcribed tracrRNA has a nucleotide sequence having at least 50% identity (e.g., at least 50%, at least 51%, at least 52%, at least 53%, at least 54%, at least 55%, at least 56%, at least 57%, at least 58%, at least 59%, or at least 60% sequence identity) to the sequence of the direct repeat. In embodiments, the Cas12a tracrRNA has a sequence that is selected from the group consisting of SEQ ID NOs:1, 3, 6, 139-146, 149-169, 223-240, and 241. An alternative embodiment of a “Cas12a tracrRNA” includes an RNA molecule having or including a nucleotide sequence based on the nucleotide sequence of a naturally occurring tracrRNA identified from a native Cas12a locus. Examples include RNA molecules that include the nucleotide sequence of a tracrRNA (or putative tracrRNA) identified from a native Cas12a locus but that further include one or more modifications such as (a) additional nucleotides, e.g., an extension at the 3′ terminus, (b) insertion, deletion, or substitution of one or more nucleotides within the naturally occurring tracrRNA sequence, preferably maintaining the secondary structure of the tracrRNA, and (c) chemical modifications, e.g., addition of a detectable label.

[0064] In embodiments of the method, the functional RNA molecule is provided by transcription of a DNA molecule including DNA encoding the Cas12a tracrRNA and DNA encoding the functional RNA moiety, wherein the DNA encoding the functional RNA moiety is inserted at a restriction endonuclease cleavage site in or adjacent to the DNA encoding the Cas12a tracrRNA. In embodiments, the restriction endonuclease cleavage site is located within the 3′ region of the DNA encoding the Cas12a tracrRNA, or within a short distance (e.g., within about 40, about 30, about 20, or about 10 nucleotides) of the 3′ end of the Cas12a tracrRNA. In embodiments, the restriction endonuclease cleavage site occurs natively in the Cas12a tracrRNA, that is to say, occurs in a naturally occurring DNA sequence that encodes a predicted or putative Cas12a tracrRNA. In other embodiments, the restriction endonuclease cleavage site is artificial or engineered; a non-limiting example includes a naturally occurring DNA sequence that encodes a predicted or putative Cas12a tracrRNA and further includes at least one nucleotide that is artificially added, deleted, or substituted to provide an engineered restriction endonuclease cleavage site located in or adjacent to the sequence encoding the tracrRNA.

[0065] In embodiments of the method, the crRNA 3′ extension includes nucleotides that when base-paired form about one helical turn. In embodiments, the crRNA 3′ extension includes at least 10 contiguous nucleotides. In embodiments, the crRNA 3′ extension increases hybridization of the Cas12a crRNA to the Cas12a tracrRNA. In some embodiments, the Cas12a tracrRNA further includes a 5′ extension, such as the 5′ extensions disclosed by Park et al. (2018) Nature Communications, doi: 10.1038/s41467-018-05641-3.

[0066] The functional RNA molecule includes a Cas12a tracrRNA and at least one functional RNA moiety. In embodiments, the functional RNA moiety is a nucleotide sequence inserted at a restriction endonuclease cleavage site in or adjacent to the DNA encoding the Cas12a tracrRNA. Non-limiting embodiments of functional RNA moieties include: (a) an RNA sequence for annealing to a donor polynucleotide (e.g., a single- or double-stranded DNA containing a nucleotide template for HDR-mediated editing, or a single- or double-stranded polynucleotide including a nucleotide sequence to be integrated by an NHEJ mechanism at a double-stranded break effected, for example, by the Cas12a nuclease); (b) an RNA sequence for annealing to the crRNA 3′ extension; (c) a terminator sequence; (d) an RNA aptamer; (e) a ribozyme or catalytically active RNA; (f) a detectable label, such as a fluorescent tag; (g) a bar-coding sequence, or short nucleotide sequence useful for marking and identifying DNA that contains the bar-coding sequence; and (h) an RNA sequence forming at least partially double-stranded RNA. In an embodiment, the functional RNA moiety includes RNA forming at least partially double-stranded RNA capable of silencing a gene (e.g., RNA that forms one or more stem-loops where the stem includes double-stranded RNA of at least about 18 base-pairs designed to silence a target gene, or RNA that has the secondary structure of a microRNA precursor and is processed to a mature microRNA designed to silence a target gene). In embodiments, the functional RNA moiety is a terminator, e.g., a terminator functional in eukaryotic cells, such as a U6 poly-T terminator, an SV40 terminator, an hGH terminator, a BGH terminator, an rbGlob terminator, a synthetic terminator functional in a eukaryotic cell, a 3′ element from an Agrobacterium sp. gene, a 3′ element from a non-human animal gene, a 3′ element from a human gene, and a 3′ element from a plant gene, wherein the 3′ element terminate transcription of an RNA transcript located immediately 5′ to the 3′ element. Non-limiting examples of RNA aptamers include an MS2 aptamer (see Parrott et al. (2000) Nucleic Acids Res., 28(2):489-497), an ARiBo tag (see Di Tomasso et al. (2011) Nucleic Acids Res., 39(3):e18; doi: 10.1093/nar/gkq1084), a streptavidin-binding aptamer (see Leppek and Stoecklin (2014) Nucleic Acids Res., 452(2):e13; doi: 10.1093/nar/gkt956), a Csy4 aptamer (see Lee et al. (2013) Proc. Natl. Acad. Sci. USA, 110(14):5416-5421; doi: 10.1073/pnas.1302807110, and a Sephadex aptamer (see Srisawat and Engelke (2002) Methods, 26(2):156-161; doi: 10.1016/S1046-2023(02)00018-X. Many aptamers are useful for affinity purification and tagging; for example, a two-element affinity tag useful for preparing large quantities of RNA includes a variant of the hepatitis delta virus (HW) ribozyme that is activated by imidazole and a hairpin loop from a thermostable SRP RNA that forms a high-affinity and kinetically stable complex with the Thermotoga maritima Ffh-M domain protein (see Keift and Batey (2004) RNA, 10(6): 988-995; doi: 10.1261/rna.7040604).

[0067] In embodiments, the method includes the step of hybridizing in vitro (a) a functional RNA molecule including a Cas12a tracrRNA and a functional RNA moiety; and (b) a Cas12a crRNA that includes a 3′ extension capable of hybridizing with a segment of the functional RNA molecule. In embodiments, the method includes the step of hybridizing in vitro (a) a functional RNA molecule including a Cas12a tracrRNA and a functional RNA moiety; and (b) a naturally occurring or an engineered Cas12a crRNA that optionally includes a 3′ extension capable of hybridizing with a segment of the functional RNA molecule. In some embodiments, a heating (melting) step and a cooling step are employed during the hybridization. In some embodiments, the hybridization is carried out at room temperature, without additional heating or cooling steps.

[0068] In many embodiments of the method, the Cas12a crRNA is complexed with, or is capable of complexing with, a Cas12a nuclease to form a Cas12a ribonucleoprotein complex containing the functional RNA molecule. Complexing of the Cas12a crRNA with the Cas12a nuclease can occur prior to, concurrently with, or after hybridization of the functional RNA molecule with the Cas12a crRNA. In embodiments, the method includes the step of hybridizing (a) a functional RNA molecule including a Cas12a tracrRNA and a functional RNA moiety; and (b) a naturally occurring Cas12a crRNA that optionally includes a 3′ extension capable of hybridizing with a segment of the functional RNA molecule; following this hybridization, the Cas12a nuclease is added to form the Cas12a ribonucleoprotein. In embodiments, the method includes the step of hybridizing (a) a functional RNA molecule including a Cas12a tracrRNA and a functional RNA moiety; and (b) an engineered Cas12a crRNA that optionally includes a 3′ extension capable of hybridizing with a segment of the functional RNA molecule; following this hybridization, the Cas12a nuclease is added to form the Cas12a ribonucleoprotein. A related aspect of the invention is therefore a modified Cas12a ribonucleoprotein complex including (a) a Cas12a nuclease; (b) a functional RNA molecule including a Cas12a tracrRNA and a functional RNA moiety; and (c) a naturally occurring or an engineered Cas12a crRNA that optionally includes a 3′ extension capable of hybridizing with a segment of the functional RNA molecule.

[0069] In embodiments of the method wherein the Cas12a crRNA is complexed with, or is capable of complexing with, a Cas12a nuclease, or in embodiments of the modified Cas12a ribonucleoprotein complex thus formed, the Cas12a nuclease is any one of the Cas12a (“Cpf1”) nucleases disclosed in U.S. Pat. No. 9,790,490 or in U.S. patent application Ser. No. 15/566,528 (national phase entry of International Application No. PCT/EP2016/058442, published as WO2016166340), or in U.S. Pat. No. 9,896,696 which are specifically incorporated herein by reference. In specific embodiments, the Cas12a nuclease is a Cas12a (“Cpf1”) nuclease identified from Francisella novicida U112 (FnCas12a or “FnCpf1”), from Acidaminococcus sp. BV3L6 (AsCas12a or “AsCpf1”), or from Lachnospiraceae bacterium ND2006 (LbCas12a or “LbCpf1”), or is an orthologue thereof, such as an orthologue having at least 50% sequence identity to FnCas12a (“FnCpf1”); see, e.g., the FnCpf1 nuclease contained in the FnCpf1 locus having SEQ ID NO:211 in U.S. Pat. No. 9,790,490, incorporated herein by reference. In embodiments, a Cas12a nuclease is (a) a Cas12a nuclease identified from the genome of a bacterial species selected from the group consisting of Francisella tularensis 1, Prevotella albensis, Lachnospiraceae bacterium MC2017 1, Butyrivibrio proteoclasticus, Peregrinibacteria bacterium GW2011_GWA2_33_10, Parcubacteria bacterium GW2011_GWC2_44_17, Smithella sp. SCADC, Acidaminococcus sp. BV3L6, Lachnospiraceae bacterium MA2020, Candidatus Methanoplasma termitum, Eubacterium eligens, Moraxella bovoculi 237, Leptospira inadai, Lachnospiraceae bacterium ND2006, Porphyromonas crevioricanis 3, Prevotella disiens and Porphyromonas macacae; or (b) a Cas12a nuclease selected from the group consisting of LbCas12a, AsCas12a, FnCas12a, and a deactivated Cas12a nuclease; or (c) a Cas12a nuclease selected from the group consisting of (1) a variant LbCpf1 that differs from a wild-type LbCpf1 sequence (SEQ ID NO:135) in containing at least one point mutation selected from the group consisting of G309P, Y312F, M4741, D523N, Q531K, C930A, D937N, V954F/Q, M975L, A984E, I994L, T1006K, I1014V, V1055N/D, L1065F/Y, Y1180F, V1209G, I1229L, V801I, Y802I, D850A, E943A, and D1198A; (2) a variant AsCpf1 that differs from a wild-type AsCpf1 sequence (SEQ ID NO:134) in containing at least one point mutation selected from the group consisting of L320P, V980A, Q987N, T1004F/Q, K1035E, T1057K, D1107N, F1117Y, N1291L, D908A, E993A, and D1263A; and (3) a variant FnCpf1 that differs from a wild-type FnCpf1 sequence (SEQ ID NO:172) in containing at least one point mutation selected from the group consisting of I339P, L342F, Q588K, F1017Q, K1047E, N1118D, F1128Y, L867I, D917A, E1006A, and D1255A. In embodiments, the Cas12a nuclease includes orthologues of LbCas12a, AsCas12a, or FnCas12a. In embodiments, the Cas12a nuclease is deactivated. In embodiments, the Cas12a nuclease includes at least one modification selected from the group consisting of: (a) a localization or signal peptide (e.g., a nuclear localization signal (NLS), a chloroplast or plastid transit peptide (CTP), or a mitochondrial targeting peptide (MTP)); (b) a detectable label (e.g., a fluorescent dye); (c) a cell-penetrating peptide; (d) an endosomal escape peptide; and (e) an affinity tag. In embodiments, the Cas12a nuclease includes at least one modification selected from a fluorescent protein (e.g., green fluorescent protein (GFP), YFP, RFP, CFP, mCherry, tdTomato, mScarlett), a histidine tag (e.g., a 6×His tag), a hemagglutinin (HA) tag, a FLAG tag, a Myc tag, horseradish peroxidase (HRP), alkaline phosphatase (AP), beta-galactosidase (GAL), glucose-6-phosphate dehydrogenase, beta-N-acetylglucosaminidase, beta-glucuronidase, invertase, xanthine oxidase (XO), firefly luciferase (LUC), and glucose oxidase (GO). The systems and compositions including a tracrRNA and methods of use thereof that are disclosed herein can also be employed with related Cas nucleases, including Csm nucleases, e.g., ObCsm1 (GenBank accession number OGX23684), SmCsm1 (GenBank accession number KF067988), MiCsm1 (GenBank accession number KKQ38176), or SuCsm1 (GenBank accession number KIM12007) (see, e.g., Begemann et al. (2017) bioRxiv, publicly available at dx[dot]doi[dot]org/10[dot]1101/192799), nucleases having a sequence selected from the group consisting of SEQ ID NOs:115, 137, 138, and variants thereof, such as a variant ObCsm1 that differs from a wild-type ObCsm1 sequence (SEQ ID NO:137) in containing at least one point mutation selected from the group consisting of K382N, Q393K, S925A, E933N, K943F/Q, K972L, K1064G, P670I, N671I, D727A, E939A, and D1053A.

### A Method of Integrating a Sequence Encoded by a Donor Polynucleotide at a Specific Locus

[0070] Another aspect of the invention provides a method of integrating or inserting a nucleotide sequence encoded by a donor polynucleotide at a specific locus in a target DNA, wherein the method includes the steps of: (1) annealing a donor polynucleotide to a modified Cas12a ribonucleoprotein complex, wherein the modified Cas12a ribonucleoprotein complex includes: (a) a Cas12a nuclease; (b) a functional RNA molecule including a Cas12a tracrRNA and a functional RNA moiety; and (c) a Cas12a crRNA that includes a 3′ extension capable of hybridizing with a segment of the functional RNA molecule; wherein the functional RNA moiety includes an RNA sequence for annealing to the donor polynucleotide; and wherein the Cas12a crRNA includes a spacer sequence that corresponds to a specific target locus in a target DNA, thus forming a donor:RNP complex; and (2) contacting the target DNA with the donor:RNP complex; whereby the nucleotide sequence encoded by the donor polynucleotide is integrated or inserted at the specific target locus in the target DNA.

[0071] In embodiments, the Cas12a nuclease that forms part of the modified Cas12a ribonucleoprotein complex is any one of the Cas12a (“Cpf1”) nucleases disclosed in U.S. Pat. No. 9,790,490 or in U.S. patent application Ser. No. 15/566,528 (national phase entry of International Application No. PCT/EP2016/058442, published as WO2016166340), or in U.S. Pat. No. 9,896,696 which are specifically incorporated herein by reference. In specific embodiments, the Cas12a nuclease is a Cas12a (“Cpf1”) nuclease identified from Francisella novicida U112 (FnCas12a or “FnCpf1”), from Acidaminococcus sp. BV3L6 (AsCas12a or “AsCpf1”), or from Lachnospiraceae bacterium ND2006 (LbCas12a or “LbCpf1”), or is an orthologue thereof, such as an orthologue having at least 50% sequence identity to FnCas12a (“FnCpf1”); see, e.g., the FnCpf1 nuclease contained in the FnCpf1 locus having SEQ ID NO:211 in U.S. Pat. No. 9,790,490, incorporated herein by reference. In embodiments, a Cas12a nuclease is (a) a Cas12a nuclease identified from the genome of a bacterial species selected from the group consisting of Francisella tularensis 1, Prevotella albensis, Lachnospiraceae bacterium MC2017 1, Butyrivibrio proteoclasticus, Peregrinibacteria bacterium GW2011_GWA2_33_10, Parcubacteria bacterium GW2011_GWC2_44_17, Smithella sp. SCADC, Acidaminococcus sp. BV3L6, Lachnospiraceae bacterium MA2020, Candidatus Methanoplasma termitum, Eubacterium eligens, Moraxella bovoculi 237, Leptospira inadai, Lachnospiraceae bacterium ND2006, Porphyromonas crevioricanis 3, Prevotella disiens and Porphyromonas macacae; or (b) a Cas12a nuclease selected from the group consisting of LbCas12a, AsCas12a, FnCas12a, and a deactivated Cas12a nuclease; or (c) a Cas12a nuclease having at least 80% sequence identity with a sequence selected from the group consisting of SEQ ID NOs:11, 107-138, 172, 204-221, and 222; or (d) a Cas12a nuclease selected from the group consisting of (1) a variant LbCpf1 that differs from a wild-type LbCpf1 sequence (SEQ ID NO:135) in containing at least one point mutation selected from the group consisting of G309P, Y312F, M4741, D523N, Q531K, C930A, D937N, V954F/Q, M975L, A984E, I994L, T1006K, I1014V, V1055N/D, L1065F/Y, Y1180F, V1209G, I1229L, V801I, Y802I, D850A, E943A, and D1198A; (2) a variant AsCpf1 that differs from a wild-type AsCpf1 sequence (SEQ ID NO:134) in containing at least one point mutation selected from the group consisting of L320P, V980A, Q987N, T1004F/Q, K1035E, T1057K, D1107N, F1117Y, N1291L, D908A, E993A, and D1263A; and (3) a variant FnCpf1 that differs from a wild-type FnCpf1 sequence (SEQ ID NO:172) in containing at least one point mutation selected from the group consisting of I339P, L342F, Q588K, F1017Q, K1047E, N1118D, F1128Y, L867I, D917A, E1006A, and D1255A. In embodiments, the Cas12a nuclease is deactivated. In embodiments, the Cas12a nuclease includes at least one modification selected from the group consisting of: (a) a localization or signal peptide (e.g., a nuclear localization signal (NLS), a chloroplast or plastid transit peptide (CTP), or a mitochondrial targeting peptide (MTP)); (b) a detectable label (e.g., a fluorescent dye); (c) a cell-penetrating peptide; (d) an endosomal escape peptide; and (e) an affinity tag. The methods including the use of a tracrRNA as disclosed herein can also be employed with related Cas nucleases, including Csm nucleases, e.g., ObCsm1 (GenBank accession number OGX23684), SmCsm1 (GenBank accession number KF067988), MiCsm1 (GenBank accession number KKQ38176), or SuCsm1 (GenBank accession number KIM12007) (see, e.g., Begemann et al. (2017) bioRxiv, publicly available at dx[dot]doi[dot]org/10[dot]1101/192799), nucleases having a sequence selected from the group consisting of SEQ ID NOs:115, 137, 138, and variants thereof, such as a variant ObCsm1 that differs from a wild-type ObCsm1 sequence (SEQ ID NO:137) in containing at least one point mutation selected from the group consisting of K382N, Q393K, S925A, E933N, K943F/Q, K972L, K1064G, P670I, N671I, D727A, E939A, and D1053A.

[0072] Embodiments of a “Cas12a tracrRNA” include an RNA molecule having the nucleotide sequence of a naturally occurring tracrRNA identified from a native Cas12a locus. For example, a naturally occurring Cas12a tracrRNA can be identified from a genome using the techniques described by Zetsche et al. (2015) Cell, 163:759-771, and in U.S. Pat. No. 9,790,490. A naturally occurring Cas12a tracrRNA can be identified from a genome as DNA sequence encoding a RNA molecule that: is predicted to be or putatively transcribed (or that may be determined to be transcribed, e.g., by RNA analysis) from a Cas12a CRISPR genomic region, specifically from a locus that flanks the DNA encoding the Cas12a CRISPR nuclease; that preferably but not necessarily includes a predicted transcriptional terminator in the direction of transcription; that is about 60 to about 100 nucleotides in length, e.g., 60-80 nucleotides, 60-85 nucleotides, 60-90 nucleotides, or 65-95 nucleotides; and that is not a direct repeat in the Cas12a CRISPR array, but rather has a nucleotide sequence that permits the transcribed tracrRNA to hybridize to the crRNA (i.e., the transcribed tracrRNA has sufficient complementarity to a crRNA sequence to hybridize to the crRNA). In embodiments, the Cas12a tracrRNA locus is directly adjacent to the DNA encoding the Cas12a nuclease. In embodiments, there is additional genomic sequence, such as DNA sequence encoding other Cas nucleases, located between the Cas12a tracrRNA locus and the DNA encoding the Cas12a nuclease; see, e.g., FIGS. 1 and 4. In embodiments, the transcribed tracrRNA has a nucleotide sequence having at least 50% identity (e.g., at least 50%, at least 51%, at least 52%, at least 53%, at least 54%, at least 55%, at least 56%, at least 57%, at least 58%, at least 59%, or at least 60% sequence identity) to the sequence of the direct repeat. In embodiments, the Cas12a tracrRNA has a sequence that is selected from the group consisting of SEQ ID NOs:1, 3, 6, 139-146, 149-169, 223-240, and 241. An alternative embodiment of a “Cas12a tracrRNA” includes an RNA molecule having or including a nucleotide sequence based on the nucleotide sequence of a naturally occurring tracrRNA identified from a native Cas12a locus. Examples include RNA molecules that include the nucleotide sequence of a tracrRNA (or putative tracrRNA) identified from a native Cas12a locus but that further include one or more modifications such as (a) additional nucleotides, e.g., an extension at the 3′ terminus, (b) insertion, deletion, or substitution of one or more nucleotides within the naturally occurring tracrRNA sequence, preferably maintaining the secondary structure of the tracrRNA, and (c) chemical modifications, e.g., addition of a detectable label.

[0073] In embodiments, the functional RNA moiety includes an RNA sequence for annealing to the donor polynucleotide. The RNA sequence for annealing to the donor polynucleotide has a length and degree of sequence identity that in combination are sufficient to allow hybridization of the functional RNA moiety and the donor polynucleotide at physiological conditions. For convenience and economy, in some embodiments, the RNA sequence for annealing to the donor polynucleotide is short, about 10 nucleotides in length, and has exact (100%) sequence complementarity to a segment of the donor polynucleotide of equivalent length. In other embodiments, the RNA sequence for annealing to the donor polynucleotide is greater than 10 nucleotides in length, and has at least 50%, at least 60%, at least 70%, at least 80%, at least 90%, or at least 95% sequence complementarity to a segment of the donor polynucleotide of equivalent length.

[0074] In embodiments, the donor polynucleotide includes single-stranded DNA, optionally including chemical modifications. In other embodiments, the donor polynucleotide includes double-stranded DNA, optionally including chemical modifications. In some embodiments, the donor polynucleotide includes both DNA and RNA, for example as a duplex formed by a DNA strand and an RNA strand. In embodiments, the donor polynucleotide is designed to include a template for genome editing via homology-dependent repair (HDR); the template generally includes a “core sequence” that is to replace a sequence of the genome of about the same size, as well as “homology arms” that flank the core sequence on either side and have a sequence complementary to the genomic regions flanking the genomic sequence to be replaced or edited. In other embodiments, the donor polynucleotide does not include homology arms or does not include a core sequence and homology arms, for example in embodiments where the donor polynucleotide is used to make a deletion.

[0075] In general, a donor polynucleotide including a template encoding a nucleotide change over a region of less than about 50 nucleotides is conveniently provided in the form of single-stranded DNA; larger donor templates (e.g., more than 100 nucleotides) are often conveniently provided as double-stranded DNAs. Thus in some embodiments, the donor polynucleotide is about 25 nucleotides, 50 nucleotides, 60 nucleotides, 70 nucleotides 80 nucleotides, 90 nucleotides, 100 nucleotides, 200 nucleotides, 300 nucleotides, 400 nucleotides, 500 nucleotides, 600 nucleotides, 700 nucleotides, 800 nucleotides, 900 nucleotides, 1000 nucleotides, 1200 nucleotides, 1500 nucleotides, 1800 nucleotides, 2000 nucleotides, 2500 nucleotides, 3000 nucleotides, 5000 nucleotides, 10,000 nucleotides, or more (such as about 25-200 nucleotides, 50-300 nucleotides, 100-500 nucleotides, 200-800 nucleotides, 700-2000 nucleotides, 1000-2500 nucleotides, 2000-5000 nucleotides, 4000-8000 nucleotides, or 6000-10,000 nucleotides).

[0076] The target DNA or target sequence (i.e., the DNA to be edited) is in many embodiments genomic DNA or chromosomal DNA of a eukaryotic cell or eukaryotic organism. In embodiments, the target DNA is mitochondrial DNA or plastid DNA. In embodiments, the target DNA includes recombinant DNA, for example, a transgene stably integrated in the genome of a eukaryote, such as of a plant. Target sequences and eukaryotic cells are described in detail below under the section headed “Related Disclosure”.

### DNA Expression Systems (I)

[0077] Another aspect of the invention provides a DNA expression system including: (a) DNA sequence for a first promoter; and (b) operably linked and heterologous to the first promoter, a DNA sequence encoding a first RNA molecule including a Cas12a tracrRNA and including a restriction endonuclease cleavage site that is suitable for insertion of a sequence coding for a functional RNA moiety.

[0078] The first promoter is heterologous to the DNA encoding a first RNA molecule including a Cas12a tracrRNA and including a restriction endonuclease cleavage site. The first promoter is selected for operability in the context (in vitro or in vivo) in which the DNA expression system is to be used. Thus, in certain embodiments, the first promoter is a promoter that functions in prokaryotic cells, such as in bacterial cells. In preferred embodiments, the first promoter is a promoter that functions in eukaryotic cells, such as in non-human animal (e.g., mammalian, human) or human or plant or fungal cells; in embodiments, the first promoter is one identified from a eukaryotic genome, such as a non-human animal or human or plant or fungal genome. In embodiments, the first promoter is a promoter selected from the group consisting of pol III promoters, pol II promoters, and pol I promoters. In embodiments, the first promoter is a promoter selected from the group consisting of a U6 promoter, an H1 promoter, a Rous sarcoma virus (RSV) LTR promoter, a cytomegalovirus (CMV) promoter, an SV40 promoter, a dihydrofolate reductase promoter, a beta-actin promoter, a phosphoglycerol kinase (PGK) promoter, and an EF1a promoter. For use in plants, useful promoters include constitutive, conditional, inducible, and temporally or spatially specific promoters (e.g., a tissue specific promoter, a developmentally regulated promoter, or a cell cycle regulated promoter). In embodiments, the promoter is a pol II promoter. In embodiments, the promoter is a constitutive promoter that drives DNA expression in plant cells; in embodiments, the promoter drives DNA expression in the nucleus or in an organelle such as a chloroplast or mitochondrion. Examples of constitutive promoters include a CaMV 35S promoter as disclosed in U.S. Pat. Nos. 5,858,742 and 5,322,938, a rice actin promoter as disclosed in U.S. Pat. No. 5,641,876, a maize chloroplast aldolase promoter as disclosed in U.S. Pat. No. 7,151,204, and an opaline synthase (NOS) and octapine synthase (OCS) promoter from Agrobacterium tumefaciens. In embodiments, the promoter is a promoter from figwort mosaic virus (FMV), a RUBISCO promoter, or a pyruvate phosphate dikinase (PDK) promoter, which is active in the chloroplasts of mesophyll cells. Other contemplated promoters include cell-specific or tissue-specific or developmentally regulated promoters, for example, a promoter that limits the expression of the DNA expression system to germline or reproductive cells (e.g., promoters of genes encoding DNA ligases, recombinases, replicases, or other genes specifically expressed in germline or reproductive cells). In embodiments, the first promoter is a plant U6 spliceosomal RNA promoter, which can be native to the genome of the plant cell or from a different species, e.g., a U6 promoter from maize, tomato, or soybean such as those disclosed in U.S. patent application Ser. No. 15/120,110, published as U.S. Patent Application Publication 2017/0166912, national phase application claiming priority to PCT/US2015/018104 (published as WO 2015/131101 and claiming priority to U.S. Provisional Patent Application 61/945,700), or a homologue thereof; in an example, such a promoter is operably linked to DNA sequence encoding a first RNA molecule including a Cas12a tracrRNA and including a restriction endonuclease cleavage site that is suitable for insertion of a sequence coding for a functional RNA moiety, followed by a suitable 3′ element such as a U6 poly-T terminator. In another embodiment, the first promoter is a plant U3, 7SL (signal recognition particle RNA), U2, or U5 promoter, or chimerics thereof, e.g., as described in U.S. patent application Ser. No. 15/120,110, published as U.S. Patent Application Publication 2017/0166912, national phase application claiming priority to PCT/US2015/018104 (published as WO 2015/131101 and claiming priority to U.S. Provisional Patent Application 61/945,700). All of the patent publications referenced in this paragraph are incorporated herein by reference in their entirety. Additional non-limiting embodiments of promoters functional in plants are provided in Example 5.

[0079] Embodiments of a “Cas12a tracrRNA” include an RNA molecule having the nucleotide sequence of a naturally occurring tracrRNA identified from a native Cas12a locus. For example, a naturally occurring Cas12a tracrRNA can be identified from a genome using the techniques described by Zetsche et al. (2015) Cell, 163:759-771, and in U.S. Pat. No. 9,790,490. A naturally occurring Cas12a tracrRNA can be identified from a genome as DNA sequence encoding a RNA molecule that: is predicted to be or putatively transcribed (or that may be determined to be transcribed, e.g., by RNA analysis) from a Cas12a CRISPR genomic region, specifically from a locus that flanks the DNA encoding the Cas12a CRISPR nuclease; that preferably includes a predicted transcriptional terminator in the direction of transcription; that is about 60 to about 100 nucleotides in length, e.g., 60-80 nucleotides, 60-85 nucleotides, 60-90 nucleotides, or 65-95 nucleotides; and that is not a direct repeat in the Cas12a CRISPR array, but rather has a nucleotide sequence that permits the transcribed tracrRNA to hybridize to the crRNA (i.e., the transcribed tracrRNA has sufficient complementarity to a crRNA sequence to hybridize to the crRNA). In embodiments, the Cas12a tracrRNA locus is directly adjacent to the DNA encoding the Cas12a nuclease. In embodiments, there is additional genomic sequence, such as DNA sequence encoding other Cas nucleases, located between the Cas12a tracrRNA locus and the DNA encoding the Cas12a nuclease; see, e.g., FIGS. 1 and 4. In embodiments, the transcribed tracrRNA has a nucleotide sequence having at least 50% identity (e.g., at least 50%, at least 51%, at least 52%, at least 53%, at least 54%, at least 55%, at least 56%, at least 57%, at least 58%, at least 59%, or at least 60% sequence identity) to the sequence of the direct repeat. In embodiments, the Cas12a tracrRNA has a sequence that is selected from the group consisting of SEQ ID NOs:1, 3, 6, 139-146, 149-169, 223-240, and 241. An alternative embodiment of a “Cas12a tracrRNA” includes an RNA molecule having or including a nucleotide sequence based on the nucleotide sequence of a naturally occurring tracrRNA identified from a native Cas12a locus. Examples include RNA molecules that include the nucleotide sequence of a tracrRNA (or putative tracrRNA) identified from a native Cas12a locus but that further include one or more modifications such as (a) additional nucleotides, e.g., an extension at the 3′ terminus, (b) insertion, deletion, or substitution of one or more nucleotides within the naturally occurring tracrRNA sequence, preferably maintaining the secondary structure of the tracrRNA, and (c) chemical modifications, e.g., addition of a detectable label. In embodiments of the DNA expression system, the Cas12a tracrRNA further includes a 5′ extension, such as the 5′ extensions disclosed by Park et al. (2018) Nature Communications, doi: 10.1038/s41467-018-05641-3.

[0080] In one application, the DNA expression system is useful for expression of an RNA molecule that includes a Cas12a tracrRNA and a functional RNA moiety. Thus, the DNA expression system includes a DNA sequence that encodes a first RNA molecule including a Cas12a tracrRNA, and that includes a restriction endonuclease cleavage site that is suitable for insertion of a sequence coding for an RNA moiety. In embodiments, the restriction endonuclease cleavage site is located in or adjacent to the DNA encoding the Cas12a tracrRNA. In embodiments, the restriction endonuclease cleavage site is located within the DNA encoding the Cas12a tracrRNA. In preferred embodiments, the restriction endonuclease cleavage site is located within the 3′ region of the DNA encoding the Cas12a tracrRNA, or within a short distance (e.g., within about 40, about 30, about 20, or about 10 nucleotides) of the 3′ end of the Cas12a tracrRNA. In many embodiments, the restriction endonuclease recognizes and binds to the DNA at the same location at which the endonuclease cuts the DNA. In some embodiments, the restriction endonuclease cleavage site (that is, where the restriction endonuclease cuts) can be at a location on the DNA at a short distance from where the restriction endonuclease recognizes and binds to the DNA. In embodiments, the restriction endonuclease cleavage site occurs natively in the Cas12a tracrRNA, that is to say, occurs in a naturally occurring DNA sequence that encodes a predicted or putative Cas12a tracrRNA. In other embodiments, the restriction endonuclease cleavage site is artificial or engineered; in a non-limiting example includes a naturally occurring DNA sequence that encodes a predicted or putative Cas12a tracrRNA and further includes at least one nucleotide that is artificially added, deleted, or substituted to provide an engineered restriction endonuclease cleavage site located in or adjacent to the sequence encoding the tracrRNA. In embodiments, the DNA expression system further includes a terminator located 3′ to the DNA sequence encoding the tracrRNA.

[0081] In embodiments, the DNA expression system further includes: (a) optionally, a DNA sequence for a second promoter; (b) operably linked and heterologous to the first promoter or the second promoter, a DNA encoding a Cas12a crRNA that includes a 3′ extension capable of hybridizing with a segment of the first RNA molecule (wherein the segment can be within or part of the tracrRNA that is part of the first RNA molecule); and (c) optionally, a terminator. The optional second promoter is selected for operability in the context (in vitro or in vivo) in which the DNA expression system is to be used. Thus, in certain embodiments, the second promoter is a promoter that functions in prokaryotic cells, such as in bacterial cells. In preferred embodiments, the second promoter is a promoter that functions in eukaryotic cells, such as in non-human animal (e.g., mammalian, human) or human or plant or fungal cells; in embodiments, the first promoter is one identified from a eukaryotic genome, such as a non-human animal or human or plant or fungal genome. In embodiments, the second promoter is a promoter such as those described as suitable for the first promoter. In embodiments, the first promoter and the second promoter, if present, are different promoters. In embodiments, the first promoter and the DNA encoding the first RNA molecule, and the DNA encoding a Cas12a crRNA that includes a 3′ extension are contained in a single construct. In some embodiments where the DNA expression system includes the second promoter, the first promoter and the DNA encoding the first RNA molecule are contained in a first construct, and the second promoter and the DNA encoding a Cas12a crRNA that includes a 3′ extension are contained in a second construct; in such embodiments, the first construct and the second construct can be provided (a) in a single vector, or (b) in separate vectors. In other embodiments, the first promoter drives expression of both the DNA encoding the first RNA molecule and the DNA encoding the Cas12a crRNA.

[0082] In embodiments where the DNA expression system further includes a terminator located 3′ to the DNA sequence encoding the tracrRNA, the terminator is functional in the cell wherein the DNA expression system is to be used. By “terminator” is meant a DNA segment near the 3′ end of an expression cassette that acts as a signal to terminate transcription and directs polyadenylation of the resultant mRNA. Such a 3′ element is also sometimes referred to as a “3′-untranslated region” or “3′-UTR” or a “polyadenylation signal”. Non-limiting embodiments of terminators functional in eukaryotic cells include a U6 poly-T terminator, an SV40 terminator, an hGH terminator, a BGH terminator, an rbGlob terminator, a synthetic terminator functional in a eukaryotic cell, a 3′ element from an Agrobacterium sp. gene, a 3′ element from a non-human animal gene, a 3′ element from a human gene, and a 3′ element from a plant gene, wherein the 3′ element terminate transcription of an RNA transcript located immediately 5′ to the 3′ element. Useful 3′ elements include: Agrobacterium tumefaciens nos 3′, tml 3′, tmr 3′, tms 3′, ocs 3′, and tr7 3′ elements disclosed in U.S. Pat. No. 6,090,627, incorporated herein by reference, and 3′ elements from plant genes such as the heat shock protein 17, ubiquitin, and fructose-1,6-biphosphatase genes from wheat (Triticum aestivum), and the glutelin, lactate dehydrogenase, and beta-tubulin genes from rice (Oryza sativa), disclosed in U.S. Patent Application Publication 2002/0192813 A1, incorporated herein by reference. Cas12a tracrRNAs (such as putative Cas12a tracrRNAs identified as described herein) may have associated endogenous pol III terminators which can be used in the DNA expression systems disclosed herein. In embodiments, the DNA expression system includes a heterologous promoter operably linked to a DNA sequence that encodes a first RNA molecule that includes a Cas12a tracrRNA and that includes a restriction endonuclease cleavage site that is suitable for insertion of a sequence coding for an RNA moiety, and further includes an endogenous pol III terminator (e.g., the terminator naturally associated with a putative Cas12a tracrRNA), or a heterologous terminator. In preferred embodiments of the various DNA expression systems disclosed herein, the terminator is functional in a eukaryotic cell, such as a plant cell; in embodiments, the terminator is one identified from eukaryotic genomic sequence, such as a plant genomic sequence. In embodiments, the terminator has a sequence selected from the group consisting of SEQ ID NOs:72-100 or comprise a U6 poly-T terminator, an SV40 terminator, an hGH terminator, a BGH terminator, an rbGlob terminator, or a synthetic terminator functional in a eukaryotic cell.

[0083] In embodiments of the DNA expression system, the Cas12a crRNA is capable of complexing with a Cas12a nuclease to form a Cas12a ribonucleoprotein complex or system. In embodiments, the Cas12a nuclease is any one of the Cas12a (“Cpf1”) nucleases disclosed in U.S. Pat. No. 9,790,490 or in U.S. patent application Ser. No. 15/566,528 (national phase entry of International Application No. PCT/EP2016/058442, published as WO2016166340), or in U.S. Pat. No. 9,896,696 which are specifically incorporated herein by reference. In specific embodiments, the Cas12a nuclease is a Cas12a (“Cpf1”) nuclease identified from Francisella novicida U112 (FnCas12a or “FnCpf1”), from Acidaminococcus sp. BV3L6 (AsCas12a or “AsCpf1”), or from Lachnospiraceae bacterium ND2006 (LbCas12a or “LbCpf1”), or is an orthologue thereof, such as an orthologue having at least 50% sequence identity to FnCas12a (“FnCpf1”); see, e.g., the FnCpf1 nuclease contained in the FnCpf1 locus having SEQ ID NO:211 in U.S. Pat. No. 9,790,490, incorporated herein by reference. In embodiments, a Cas12a nuclease is (a) a Cas12a nuclease identified from the genome of a bacterial species selected from the group consisting of Francisella tularensis 1, Prevotella albensis, Lachnospiraceae bacterium MC2017 1, Butyrivibrio proteoclasticus, Peregrinibacteria bacterium GW2011_GWA2_33_10, Parcubacteria bacterium GW2011_GWC2_44_17, Smithella sp. SCADC, Acidaminococcus sp. BV3L6, Lachnospiraceae bacterium MA2020, Candidatus Methanoplasma termitum, Eubacterium eligens, Moraxella bovoculi 237, Leptospira inadai, Lachnospiraceae bacterium ND2006, Porphyromonas crevioricanis 3, Prevotella disiens and Porphyromonas macacae; or (b) a Cas12a nuclease selected from the group consisting of LbCas12a, AsCas12a, FnCas12a, and a deactivated Cas12a nuclease; or (c) a Cas12a nuclease having at least 80% sequence identity with a sequence selected from the group consisting of SEQ ID NOs:11, 107-138, 172, 204-221, and 222; or (d) a Cas12a nuclease selected from the group consisting of (1) a variant LbCpf1 that differs from a wild-type LbCpf1 sequence (SEQ ID NO:135) in containing at least one point mutation selected from the group consisting of G309P, Y312F, M4741, D523N, Q531K, C930A, D937N, V954F/Q, M975L, A984E, I994L, T1006K, I1014V, V1055N/D, L1065F/Y, Y1180F, V1209G, I1229L, V801I, Y802I, D850A, E943A, and D1198A; (2) a variant AsCpf1 that differs from a wild-type AsCpf1 sequence (SEQ ID NO:134) in containing at least one point mutation selected from the group consisting of L320P, V980A, Q987N, T1004F/Q, K1035E, T1057K, D1107N, F1117Y, N1291L, D908A, E993A, and D1263A; and (3) a variant FnCpf1 that differs from a wild-type FnCpf1 sequence (SEQ ID NO:172) in containing at least one point mutation selected from the group consisting of I339P, L342F, Q588K, F1017Q, K1047E, N1118D, F1128Y, L867I, D917A, E1006A, and D1255A. In embodiments, the Cas12a nuclease is deactivated. In embodiments, the Cas12a nuclease includes at least one modification selected from the group consisting of: (a) a localization signal (e.g., a nuclear localization signal, a mitochondrial localization signal, or a plastid localization signal); (b) a detectable label (e.g., a fluorescent dye); (c) a cell-penetrating peptide; (d) an endosomal escape peptide; and (e) an affinity tag. In embodiments of the DNA expression system, the first promoter has a DNA sequence selected from the group consisting of SEQ ID NOs:16-71 or comprises a promoter selected from the group consisting of a U6 promoter, an H1 promoter, a Rous sarcoma virus (RSV) LTR promoter, a cytomegalovirus (CMV) promoter, an SV40 promoter, a dihydrofolate reductase promoter, a beta-actin promoter, a phosphoglycerol kinase (PGK) promoter, and an EF1a promoter and the Cas12a tracrRNA has a nucleotide sequence including a sequence selected from the group consisting of SEQ ID NOs:1, 3, 6, 139-146, 149-169, 223-240, and 241. In embodiments of the DNA expression system, the first promoter has a DNA sequence selected from the group consisting of SEQ ID NOs:16-71, the Cas12a tracrRNA has a nucleotide sequence including a sequence selected from the group consisting of SEQ ID NOs:1, 3, 6, 139-146, 149-169, 223-240, and 241, and the optional first terminator has a sequence selected from the group consisting of SEQ ID NOs:72-100 or comprise a U6 poly-T terminator, an SV40 terminator, an hGH terminator, a BGH terminator, an rbGlob terminator, or a synthetic terminator functional in a eukaryotic cell. The systems including a tracrRNA as disclosed herein can also be employed with related Cas nucleases, including Csm nucleases, e.g., ObCsm1 (GenBank accession number OGX23684), SmCsm1 (GenBank accession number KF067988), MiCsm1 (GenBank accession number KKQ38176), or SuCsm1 (GenBank accession number KIM12007) (see, e.g., Begemann et al. (2017) bioRxiv, publicly available at dx[dot]doi[dot]org/10[dot]1101/192799), nucleases having a sequence selected from the group consisting of SEQ ID NOs:115, 137, 138, and variants thereof, such as a variant ObCsm1 that differs from a wild-type ObCsm1 sequence (SEQ ID NO:137) in containing at least one point mutation selected from the group consisting of K382N, Q393K, S925A, E933N, K943F/Q, K972L, K1064G, P670I, N671I, D727A, E939A, and D1053A.

### DNA Expression Systems (II)

[0084] Another aspect of the invention provides a DNA expression system including: (a) DNA sequence for a first promoter; and (b) operably linked and heterologous to the first promoter, a DNA sequence encoding a functional RNA molecule including a Cas12a tracrRNA and a functional RNA moiety. In embodiments, the DNA expression system includes (a) DNA sequence for a first promoter; and (b) operably linked and heterologous to the first promoter, a DNA sequence encoding a functional RNA molecule including a Cas12a tracrRNA and a functional RNA moiety, and (c) a terminator 3′ to and operably linked to the DNA encoding a functional RNA molecule. In embodiments, the DNA expression system further includes: (a) optionally, a DNA sequence for a second promoter; (b) operably linked and heterologous to the first promoter or the second promoter, a DNA encoding a Cas12a crRNA that includes a 3′ extension capable of hybridizing with a segment of the functional RNA molecule; and (c) optionally, a terminator.

[0085] The first promoter is heterologous to the DNA sequence encoding a functional RNA molecule including a Cas12a tracrRNA and a functional RNA moiety. Where the DNA expression system further includes a DNA encoding a Cas12a crRNA that includes a 3′ extension capable of hybridizing with a segment of the functional RNA molecule, the first promoter is also heterologous to this DNA. The optional second promoter is heterologous to the DNA encoding a Cas12a crRNA that includes a 3′ extension capable of hybridizing with a segment of the functional RNA molecule. Each promoter is selected for operability in the context (in vitro or in vivo) in which the DNA expression system is to be used. Thus, in embodiments, the first promoter (and the optional second promoter) is a promoter that functions in prokaryotic cells, such as in bacterial cells. In preferred embodiments, the first promoter is a promoter that functions in eukaryotic cells, such as in non-human animal (e.g., mammalian, human) or human or plant or fungal cells; in embodiments, the first promoter is one identified from a eukaryotic genome, such as a non-human animal or human or plant or fungal genome. In embodiments, the first promoter is a promoter selected from the group consisting of pol III promoters, pol II promoters, and pol I promoters. In embodiments, the first promoter is a promoter selected from the group consisting of a U6 promoter, an H1 promoter, a Rous sarcoma virus (RSV) LTR promoter, a cytomegalovirus (CMV) promoter, an SV40 promoter, a dihydrofolate reductase promoter, a beta-actin promoter, a phosphoglycerol kinase (PGK) promoter, and an EF1a promoter. In embodiments, the first promoter (and the optional second promoter) is a promoter that functions in eukaryotic cells, such as in plant cells. For use in plants, useful promoters include constitutive, conditional, inducible, and temporally or spatially specific promoters (e.g., a tissue specific promoter, a developmentally regulated promoter, or a cell cycle regulated promoter). In embodiments, the promoter is a pol II promoter. In embodiments, the promoter is a constitutive promoter that drives DNA expression in plant cells; in embodiments, the promoter drives DNA expression in the nucleus or in an organelle such as a chloroplast or mitochondrion. Examples of constitutive promoters include a CaMV 35S promoter as disclosed in U.S. Pat. Nos. 5,858,742 and 5,322,938, a rice actin promoter as disclosed in U.S. Pat. No. 5,641,876, a maize chloroplast aldolase promoter as disclosed in U.S. Pat. No. 7,151,204, and an opaline synthase (NOS) and octapine synthase (OCS) promoter from Agrobacterium tumefaciens. In embodiments, the promoter is a promoter from figwort mosaic virus (FMV), a RUBISCO promoter, or a pyruvate phosphate dikinase (PDK) promoter, which is active in the chloroplasts of mesophyll cells. Other contemplated promoters include cell-specific or tissue-specific or developmentally regulated promoters, for example, a promoter that limits the expression of the DNA expression system to germline or reproductive cells (e.g., promoters of genes encoding DNA ligases, recombinases, replicases, or other genes specifically expressed in germline or reproductive cells). In embodiments, the first promoter is a plant U6 spliceosomal RNA promoter, which can be native to the genome of the plant cell or from a different species, e.g., a U6 promoter from maize, tomato, or soybean such as those disclosed in U.S. patent application Ser. No. 15/120,110, published as U.S. Patent Application Publication 2017/0166912, national phase application claiming priority to PCT/US2015/018104 (published as WO 2015/131101 and claiming priority to U.S. Provisional Patent Application 61/945,700), or a homologue thereof; in an example, such a promoter is operably linked to DNA sequence encoding a functional RNA molecule including a Cas12a tracrRNA and a functional RNA moiety, followed by a suitable 3′ element such as a U6 poly-T terminator. In another embodiment, the first promoter is a plant U3, 7SL (signal recognition particle RNA), U2, or U5 promoter, or chimerics thereof, e.g., as described in U.S. patent application Ser. No. 15/120,110, published as U.S. Patent Application Publication 2017/0166912, national phase application claiming priority to PCT/US2015/018104 (published as WO 2015/131101 and claiming priority to U.S. Provisional Patent Application 61/945,700). All of the patent publications referenced in this paragraph are incorporated herein by reference in their entirety.

[0086] Embodiments of a “Cas12a tracrRNA” include an RNA molecule having the nucleotide sequence of a naturally occurring tracrRNA identified from a native Cas12a locus. For example, a naturally occurring Cas12a tracrRNA can be identified from a genome using the techniques described by Zetsche et al. (2015) Cell, 163:759-771, and in U.S. Pat. No. 9,790,490. A naturally occurring Cas12a tracrRNA can be identified from a genome as DNA sequence encoding a RNA molecule that: is predicted to be or putatively transcribed (or that may be determined to be transcribed, e.g., by RNA analysis) from a Cas12a CRISPR genomic region, specifically from a locus that flanks the DNA encoding the Cas12a CRISPR nuclease; that preferably includes a predicted transcriptional terminator in the direction of transcription; that is about 60 to about 100 nucleotides in length, e.g., 60-80 nucleotides, 60-85 nucleotides, 60-90 nucleotides, or 65-95 nucleotides; and that is not a direct repeat in the Cas12a CRISPR array, but rather has a nucleotide sequence that permits the transcribed tracrRNA to hybridize to the crRNA (i.e., the transcribed tracrRNA has sufficient complementarity to a crRNA sequence to hybridize to the crRNA). In embodiments, the Cas12a tracrRNA locus is directly adjacent to the DNA encoding the Cas12a nuclease. In embodiments, there is additional genomic sequence, such as DNA sequence encoding other Cas nucleases, located between the Cas12a tracrRNA locus and the DNA encoding the Cas12a nuclease; see, e.g., FIGS. 1 and 4. In embodiments, the transcribed tracrRNA has a nucleotide sequence having at least 50% identity (e.g., at least 50%, at least 51%, at least 52%, at least 53%, at least 54%, at least 55%, at least 56%, at least 57%, at least 58%, at least 59%, or at least 60% sequence identity) to the sequence of the direct repeat. In embodiments, the Cas12a tracrRNA has a sequence that is selected from the group consisting of SEQ ID NOs:1, 3, 6, 139-146, 149-169, 223-240, and 241. An alternative embodiment of a “Cas12a tracrRNA” includes an RNA molecule having or including a nucleotide sequence based on the nucleotide sequence of a naturally occurring tracrRNA identified from a native Cas12a locus. Examples include RNA molecules that include the nucleotide sequence of a tracrRNA (or putative tracrRNA) identified from a native Cas12a locus but that further include one or more modifications such as (a) additional nucleotides, e.g., an extension at the 3′ terminus, (b) insertion, deletion, or substitution of one or more nucleotides within the naturally occurring tracrRNA sequence, preferably maintaining the secondary structure of the tracrRNA, and (c) chemical modifications, e.g., addition of a detectable label. In embodiments of the DNA expression system, the Cas12a tracrRNA further includes a 5′ extension, such as the 5′ extensions disclosed by Park et al. (2018) Nature Communications, doi: 10.1038/s41467-018-05641-3.

[0087] In embodiments where the DNA expression system further includes a terminator located 3′ to and operably linked to the DNA encoding a functional RNA molecule, the terminator is functional in the cell wherein the DNA expression system is to be used. By “terminator” is meant a DNA segment near the 3′ end of an expression cassette that acts as a signal to terminate transcription and directs polyadenylation of the resultant mRNA. Such a 3′ element is also sometimes referred to as a “3′-untranslated region” or “3′-UTR” or a “polyadenylation signal”. Non-limiting embodiments of terminators functional in eukaryotic cells include a U6 poly-T terminator, an SV40 terminator, an hGH terminator, a BGH terminator, an rbGlob terminator, a synthetic terminator functional in a eukaryotic cell, a 3′ element from an Agrobacterium sp. gene, a 3′ element from a non-human animal gene, a 3′ element from a human gene, and a 3′ element from a plant gene, wherein the 3′ element terminate transcription of an RNA transcript located immediately 5′ to the 3′ element. Useful 3′ elements include: Agrobacterium tumefaciens nos 3′, tml 3′, tmr 3′, tms 3′, ocs 3′, and tr7 3′ elements disclosed in U.S. Pat. No. 6,090,627, incorporated herein by reference, and 3′ elements from plant genes such as the heat shock protein 17, ubiquitin, and fructose-1,6-biphosphatase genes from wheat (Triticum aestivum), and the glutelin, lactate dehydrogenase, and beta-tubulin genes from rice (Oryza sativa), disclosed in U.S. Patent Application Publication 2002/0192813 A1, incorporated herein by reference. Cas12a tracrRNAs (such as putative Cas12a tracrRNAs identified as described herein) may have associated endogenous pol III terminators which can be used in the DNA expression systems disclosed herein. In embodiments, the DNA expression system includes: (a) DNA sequence for a first promoter; (b) operably linked and heterologous to the first promoter, a DNA sequence encoding a functional RNA molecule including a Cas12a tracrRNA and a functional RNA moiety; and (c) an endogenous pol III terminator (e.g., the terminator naturally associated with a putative Cas12a tracrRNA), or a heterologous terminator. In preferred embodiments of the various DNA expression systems disclosed herein, the terminator is functional in a eukaryotic cell, such as a plant cell; in embodiments, the terminator is one identified from eukaryotic genomic sequence, such as a plant genomic sequence.

[0088] In embodiments of the DNA expression system, the first promoter and the DNA encoding the functional RNA molecule, and the DNA encoding a Cas12a crRNA that includes a 3′ extension are contained in a single construct. In embodiments of the DNA expression system that include the optional second promoter, the first promoter and the DNA encoding the functional RNA molecule are contained in a first construct, and the second promoter and the DNA encoding a Cas12a crRNA that includes a 3′ extension are contained in a second construct; in such embodiments, the first construct and the second construct can be provided (a) in a single vector, or (b) in separate vectors. In embodiments, the first promoter drives expression of both the DNA encoding the functional RNA molecule and the DNA encoding the Cas12a crRNA.

[0089] The DNA expression system is useful for expressing a functional RNA molecule including a Cas12a tracrRNA and a functional RNA moiety. Non-limiting embodiments of functional RNA moieties include: (a) an RNA sequence for annealing to a donor polynucleotide (e.g., a single- or double-stranded DNA containing a nucleotide template for HDR-mediated editing, or a single- or double-stranded polynucleotide including a nucleotide sequence to be integrated by an NHEJ mechanism at a double-stranded break effected, for example, by the Cas12a nuclease); (b) an RNA sequence for annealing to the crRNA 3′ extension; (c) a terminator sequence; (d) an RNA aptamer; (e) a ribozyme or catalytically active RNA; (f) a detectable label, such as a fluorescent tag; (g) a bar-coding sequence, or short nucleotide sequence useful for marking and identifying DNA that contains the bar-coding sequence; and (h) an RNA sequence forming at least partially double-stranded RNA. In an embodiment, the functional RNA moiety includes RNA forming at least partially double-stranded RNA capable of silencing a gene (e.g., RNA that forms one or more stem-loops where the stem includes double-stranded RNA of at least about 18 base-pairs designed to silence a target gene, or RNA that has the secondary structure of a microRNA precursor and is processed to a mature microRNA designed to silence a target gene). Non-limiting examples of RNA aptamers include an MS2 aptamer (see Parrott et al. (2000) Nucleic Acids Res., 28(2):489-497), an ARiBo tag (see Di Tomasso et al. (2011) Nucleic Acids Res., 39(3):e18; doi: 10.1093/nar/gkq1084), a streptavidin-binding aptamer (see Leppek and Stoecklin (2014) Nucleic Acids Res., 452(2):e13; doi: 10.1093/nar/gkt956), a Csy4 aptamer (see Lee et al. (2013) Proc. Natl. Acad. Sci. USA, 110(14):5416-5421; doi: 10.1073/pnas.1302807110, and a Sephadex aptamer (see Srisawat and Engelke (2002) Methods, 26(2):156-161; doi: 10.1016/S1046-2023(02)00018-X. Many aptamers are useful for affinity purification and tagging; for example, a two-element affinity tag useful for preparing large quantities of RNA includes a variant of the hepatitis delta virus (HW) ribozyme that is activated by imidazole and a hairpin loop from a thermostable SRP RNA that forms a high-affinity and kinetically stable complex with the Thermotoga maritima Ffh-M domain protein (see Keift and Batey (2004) RNA, 10(6): 988-995; doi: 10.1261/rna.7040604).

[0090] In embodiments of the DNA expression system, the Cas12a crRNA is capable of complexing with a Cas12a nuclease to form a Cas12a ribonucleoprotein complex containing the functional RNA molecule including a Cas12a tracrRNA and a functional RNA moiety. In embodiments, the Cas12a nuclease is any one of the Cas12a (“Cpf1”) nucleases disclosed in U.S. Pat. No. 9,790,490 or in U.S. patent application Ser. No. 15/566,528 (national phase entry of International Application No. PCT/EP2016/058442, published as WO2016166340), or in U.S. Pat. No. 9,896,696 which are specifically incorporated herein by reference. In specific embodiments, the Cas12a nuclease is a Cas12a (“Cpf1”) nuclease identified from Francisella novicida U112 (FnCas12a or “FnCpf1”), from Acidaminococcus sp. BV3L6 (AsCas12a or “AsCpf1”), or from Lachnospiraceae bacterium ND2006 (LbCas12a or “LbCpf1”), or is an orthologue thereof, such as an orthologue having at least 50% sequence identity to FnCas12a (“FnCpf1”); see, e.g., the FnCpf1 nuclease contained in the FnCpf1 locus having SEQ ID NO:211 in U.S. Pat. No. 9,790,490, specifically incorporated herein by reference. In embodiments, a Cas12a nuclease is (a) a Cas12a nuclease identified from the genome of a bacterial species selected from the group consisting of Francisella tularensis 1, Prevotella albensis, Lachnospiraceae bacterium MC2017 1, Butyrivibrio proteoclasticus, Peregrinibacteria bacterium GW2011_GWA2_33_10, Parcubacteria bacterium GW2011_GWC2_44_17, Smithella sp. SCADC, Acidaminococcus sp. BV3L6, Lachnospiraceae bacterium MA2020, Candidatus Methanoplasma termitum, Eubacterium eligens, Moraxella bovoculi 237, Leptospira inadai, Lachnospiraceae bacterium ND2006, Porphyromonas crevioricanis 3, Prevotella disiens and Porphyromonas macacae; or (b) a Cas12a nuclease selected from the group consisting of LbCas12a, AsCas12a, FnCas12a, and a deactivated Cas12a nuclease; or (c) a Cas12a nuclease having at least 80% sequence identity with a sequence selected from the group consisting of SEQ ID NOs:11, 107-138, 172, 204-221, and 222; or (d) a Cas12a nuclease variant selected from the group consisting of (1) a variant LbCpf1 that differs from a wild-type LbCpf1 sequence (SEQ ID NO:135) in containing at least one point mutation selected from the group consisting of G309P, Y312F, M4741, D523N, Q531K, C930A, D937N, V954F/Q, M975L, A984E, I994L, T1006K, I1014V, V1055N/D, L1065F/Y, Y1180F, V1209G, I1229L, V801I, Y802I, D850A, E943A, and D1198A; (2) a variant AsCpf1 that differs from a wild-type AsCpf1 sequence (SEQ ID NO:134) in containing at least one point mutation selected from the group consisting of L320P, V980A, Q987N, T1004F/Q, K1035E, T1057K, D1107N, F1117Y, N1291L, D908A, E993A, and D1263A; and (3) a variant FnCpf1 that differs from a wild-type FnCpf1 sequence (SEQ ID NO:172) in containing at least one point mutation selected from the group consisting of I339P, L342F, Q588K, F1017Q, K1047E, N1118D, F1128Y, L867I, D917A, E1006A, and D1255A. In embodiments, the Cas12a nuclease is deactivated. In embodiments, the Cas12a nuclease includes at least one modification selected from the group consisting of: (a) a localization signal (e.g., a nuclear localization signal, a mitochondrial localization signal, or a plastid localization signal); (b) a detectable label (e.g., a fluorescent dye); (c) a cell-penetrating peptide; (d) an endosomal escape peptide; and (e) an affinity tag. In embodiments of the DNA expression system, the first promoter has a DNA sequence selected from the group consisting of SEQ ID NOs:16-71 or comprises a promoter selected from the group consisting of a U6 promoter, an H1 promoter, a Rous sarcoma virus (RSV) LTR promoter, a cytomegalovirus (CMV) promoter, an SV40 promoter, a dihydrofolate reductase promoter, a beta-actin promoter, a phosphoglycerol kinase (PGK) promoter, and an EF1a promoter and the Cas12a tracrRNA has a nucleotide sequence including a sequence selected from the group consisting of SEQ ID NOs:1, 3, 6, 139-146, 149-169, 223-240, and 241. In embodiments of the DNA expression system, the first promoter has a DNA sequence selected from the group consisting of SEQ ID NOs:16-71, the Cas12a tracrRNA has a nucleotide sequence including a sequence selected from the group consisting of SEQ ID NOs:1, 3, 6, 139-146, 149-169, 223-240, and 241, and the optional first terminator has a sequence selected from the group consisting of SEQ ID NOs:72-100 or comprise a U6 poly-T terminator, an SV40 terminator, an hGH terminator, a BGH terminator, an rbGlob terminator, or a synthetic terminator functional in a eukaryotic cell. The systems including a tracrRNA as disclosed herein can also be employed with related Cas nucleases, including Csm nucleases, e.g., ObCsm1 (GenBank accession number OGX23684), SmCsm1 (GenBank accession number KF067988), MiCsm1 (GenBank accession number KKQ38176), or SuCsm1 (GenBank accession number KIM12007) (see, e.g., Begemann et al. (2017) bioRxiv, publicly available at dx[dot]doi[dot]org/10[dot]1101/192799), nucleases having a sequence selected from the group consisting of SEQ ID NOs:115, 137, 138, and variants thereof, such as a variant ObCsm1 that differs from a wild-type ObCsm1 sequence (SEQ ID NO:137) in containing at least one point mutation selected from the group consisting of K382N, Q393K, S925A, E933N, K943F/Q, K972L, K1064G, P670I, N671I, D727A, E939A, and D1053A.

### Engineered Systems

[0091] Another aspect of the invention provides a first engineered system including: (a) a Cas12a nuclease; and (b) at least one engineered Cas12a crRNA, or a polynucleotide encoding the engineered Cas12a crRNA, wherein the engineered Cas12a crRNA includes (i) at least one direct repeat sequence or fragment thereof that is capable of associating with the Cas12a nuclease, and (ii) a spacer sequence that is designed to hybridize with a target sequence in a eukaryotic cell, wherein the at least one direct repeat sequence or fragment thereof is adjacent to and 5′ to the spacer sequence; and (c) a Cas12a tracrRNA including a nucleotide sequence that has at least 50% complementarity with, the nucleotide sequence of the at least one direct repeat of the engineered Cas12a crRNA.

[0092] In another aspect, the invention provides a second engineered system including: (a) a Cas12a nuclease; and (b) at least one engineered Cas12a crRNA, or a polynucleotide encoding the engineered Cas12a crRNA, wherein the engineered Cas12a crRNA includes (i) at least one direct repeat sequence or fragment thereof that is capable of associating with the Cas12a nuclease, and (ii) a spacer sequence that is designed to hybridize with a target sequence in a eukaryotic cell, wherein the at least one direct repeat sequence or fragment thereof is adjacent to and 5′ to the spacer sequence; and (c) a Cas12a tracrRNA including a naturally occurring putative Cas12a tracrRNA sequence that is identified from the same genomic region as the Cas12a nuclease by at least the following steps: (i) identifying in the genomic region flanking the DNA encoding the Cas12a nuclease at least one nucleotide sequence that includes a CRISPR array including direct repeats, and (ii) identifying as a putative Cas12a tracrRNA at least one nucleotide sequence in either the sense or antisense direction in the genomic region flanking the DNA encoding the Cas12a nuclease, wherein the putative Cas12a tracrRNA has a nucleotide sequence that has at least 50% complementarity with, the nucleotide sequence of the direct repeat.

[0093] In embodiments of the first or second engineered systems, the Cas12a nuclease is (a) a Cas12a nuclease identified from the genome of a bacterial species selected from the group consisting of Francisella tularensis 1, Prevotella albensis, Lachnospiraceae bacterium MC2017 1, Butyrivibrio proteoclasticus, Peregrinibacteria bacterium GW2011_GWA2_33_10, Parcubacteria bacterium GW2011_GWC2_44_17, Smithella sp. SCADC, Acidaminococcus sp. BV3L6, Lachnospiraceae bacterium MA2020, Candidatus Methanoplasma termitum, Eubacterium eligens, Moraxella bovoculi 237, Leptospira inadai, Lachnospiraceae bacterium ND2006, Porphyromonas crevioricanis 3, Prevotella disiens and Porphyromonas macacae; or (b) a Cas12a nuclease selected from the group consisting of LbCas12a, AsCas12a, FnCas12a, and a deactivated Cas12a nuclease; or (c) a Cas12a nuclease having at least 80% sequence identity with a sequence selected from the group consisting of SEQ ID NOs:11, 107-138, 172, 204-221, and 222; or (d) a Cas12a nuclease variant selected from the group consisting of (1) a variant LbCpf1 that differs from a wild-type LbCpf1 sequence (SEQ ID NO:135) in containing at least one point mutation selected from the group consisting of G309P, Y312F, M4741, D523N, Q531K, C930A, D937N, V954F/Q, M975L, A984E, I994L, T1006K, I1014V, V1055N/D, L1065F/Y, Y1180F, V1209G, I1229L, V801I, Y802I, D850A, E943A, and D1198A; (2) a variant AsCpf1 that differs from a wild-type AsCpf1 sequence (SEQ ID NO:134) in containing at least one point mutation selected from the group consisting of L320P, V980A, Q987N, T1004F/Q, K1035E, T1057K, D1107N, F1117Y, N1291L, D908A, E993A, and D1263A; and (3) a variant FnCpf1 that differs from a wild-type FnCpf1 sequence (SEQ ID NO:172) in containing at least one point mutation selected from the group consisting of I339P, L342F, Q588K, F1017Q, K1047E, N1118D, F1128Y, L867I, D917A, E1006A, and D1255A. In embodiments, the Cas12a nuclease is deactivated. In embodiments, the Cas12a nuclease includes at least one modification selected from the group consisting of: (a) a localization signal (e.g., a nuclear localization signal, a mitochondrial localization signal, or a plastid localization signal); (b) a detectable label (e.g., a fluorescent dye); (c) a cell-penetrating peptide; (d) an endosomal escape peptide; and (e) an affinity tag. The systems including a tracrRNA as disclosed herein can also be employed with related Cas nucleases, including Csm nucleases, e.g., ObCsm1 (GenBank accession number OGX23684), SmCsm1 (GenBank accession number KF067988), MiCsm1 (GenBank accession number KKQ38176), or SuCsm1 (GenBank accession number KIM12007) (see, e.g., Begemann et al. (2017) bioRxiv, publicly available at dx[dot]doi[dot]org/10[dot]1101/192799), nucleases having a sequence selected from the group consisting of SEQ ID NOs:115, 137, 138, and variants thereof, such as a variant ObCsm1 that differs from a wild-type ObCsm1 sequence (SEQ ID NO:137) in containing at least one point mutation selected from the group consisting of K382N, Q393K, S925A, E933N, K943F/Q, K972L, K1064G, P670I, N671I, D727A, E939A, and D1053A.

[0094] In embodiments of the first or second engineered systems, the Cas12a tracrRNA includes a nucleotide sequence that has at least 50% complementarity with, the nucleotide sequence of the at least one direct repeat of the engineered Cas12a crRNA; such a Cas12a tracrRNA can include a naturally occurring putative Cas12a tracrRNA sequence identified from a native Cas12a locus. For example, a naturally occurring putative Cas12a tracrRNA sequence can be identified from a genome using the techniques described by Zetsche et al. (2015) Cell, 163:759-771, and in U.S. Pat. No. 9,790,490. A naturally occurring putative Cas12a tracrRNA sequence can be identified from a genome as DNA sequence encoding a RNA molecule that: is predicted to be or putatively transcribed (or that may be determined to be transcribed, e.g., by RNA analysis) from a Cas12a CRISPR genomic region, specifically from a locus that flanks the DNA encoding the Cas12a CRISPR nuclease; that preferably includes a predicted transcriptional terminator in the direction of transcription; that is about 60 to about 100 nucleotides in length, e.g., 60-80 nucleotides, 60-85 nucleotides, 60-90 nucleotides, or 65-95 nucleotides; and that is not a direct repeat in the Cas12a CRISPR array, but rather has a nucleotide sequence that permits the transcribed tracrRNA to hybridize to the crRNA (i.e., the naturally occurring putative Cas12a tracrRNA sequence has sufficient complementarity to a crRNA sequence to hybridize to the crRNA). In embodiments, the Cas12a tracrRNA locus is directly adjacent to the DNA encoding the Cas12a nuclease. In embodiments, there is additional genomic sequence, such as DNA sequence encoding other Cas nucleases, located between the Cas12a tracrRNA locus and the DNA encoding the Cas12a nuclease; see, e.g., FIGS. 1 and 4. In embodiments, the naturally occurring putative Cas12a tracrRNA sequence has a nucleotide sequence having at least 50% identity (e.g., at least 50%, at least 51%, at least 52%, at least 53%, at least 54%, at least 55%, at least 56%, at least 57%, at least 58%, at least 59%, or at least 60% sequence identity) to the sequence of the direct repeat. In embodiments of the first or second engineered systems, the Cas12a tracrRNA has a nucleotide sequence including a sequence selected from the group consisting of SEQ ID NOs:1, 3, 6, 139-146, 149-169, 223-240, and 241. An alternative embodiment of a “Cas12a tracrRNA” includes an RNA molecule having or including a nucleotide sequence based on the nucleotide sequence of a naturally occurring putative Cas12a tracrRNA sequence identified from a native Cas12a locus. Examples include RNA molecules that include the nucleotide sequence of a naturally occurring putative Cas12a tracrRNA sequence identified from a native Cas12a locus but that further include one or more modifications such as (a) additional nucleotides, e.g., an extension at the 3′ terminus, (b) insertion, deletion, or substitution of one or more nucleotides within the naturally occurring tracrRNA sequence, preferably maintaining the secondary structure of the tracrRNA, and (c) chemical modifications, e.g., addition of a detectable label. In embodiments of the first or second engineered systems, the Cas12a tracrRNA further includes a 5′ extension, such as the 5′ extensions disclosed by Park et al. (2018) Nature Communications, doi: 10.1038/s41467-018-05641-3.

[0095] In embodiments of the first or second engineered systems, the engineered Cas12a crRNA includes a spacer sequence that is designed to hybridize with a target sequence in a eukaryotic cell. Target sequences and eukaryotic cells are described in detail below under the section headed “Related Disclosure”. In embodiments of the first or second engineered systems, the “polynucleotide encoding the engineered Cas12a crRNA” is a naturally occurring polynucleotide, e.g., a pre-processed transcript that includes at least the Cas12a crRNA and often includes additional nucleotides that are removed during processing. In embodiments of the first or second engineered systems, the “polynucleotide encoding the engineered Cas12a crRNA” is an engineered or recombinant polynucleotide. In embodiments of the first or second engineered systems, the engineered Cas12a crRNA, or the polynucleotide encoding the engineered Cas12a crRNA, further includes at least one direct repeat sequence or fragment thereof capable of associating with the Cas12a nuclease, wherein the at least one direct repeat sequence or fragment thereof is adjacent to and 3′ to the spacer sequence. In some embodiments of the first or second engineered systems wherein the engineered Cas12a crRNA further includes at least one direct repeat sequence or fragment thereof capable of associating with the Cas12a nuclease, wherein the at least one direct repeat sequence or fragment thereof is adjacent to and 3′ to the spacer sequence, the Cas12a tracrRNA has a nucleotide sequence that has at least about 50% or preferably greater than 50% complementarity to the at least one direct repeat sequence or fragment adjacent to and 3′ to the spacer sequence.

[0096] In embodiments of the first or second engineered systems, the engineered Cas12a crRNA, or the polynucleotide encoding the engineered Cas12a crRNA, further includes: (a) at least one direct repeat sequence or fragment thereof capable of associating with the Cas12a nuclease, wherein the at least one direct repeat sequence or fragment thereof is adjacent to and 3′ to the spacer sequence; and (b) a 3′extension adjacent to the spacer sequence. In embodiments of the first or second engineered systems, the 3′ extension includes nucleotides that when base-paired form about one helical turn. In embodiments of the first or second engineered systems, the 3′ extension includes at least 10 contiguous nucleotides. In embodiments of the first or second engineered systems wherein the engineered Cas12a crRNA further includes a 3′ extension adjacent to the spacer sequence, the Cas12a tracrRNA includes a nucleotide sequence having sufficient complementarity (e.g., about 50% or greater than 50%) to the engineered Cas12a crRNA's 3′ extension to allow hybridization between the tracrRNA and the engineered Cas12a crRNA. In embodiments, the polynucleotide encoding the engineered Cas12a crRNA is a pre-processed Cas12a crRNA precursor transcript that includes, in 5′ to 3′ direction, a first direct repeat or fragment thereof, the spacer, and a 3′ extension; in some embodiments, the 3′ extension includes a second direct repeat or fragment thereof, and/or includes at least 10 contiguous nucleotides, and/or includes nucleotides that when base-paired form about one helical turn; in some embodiments, such a pre-processed Cas12a crRNA precursor transcript is processed (e.g., in vivo or in vitro), resulting in a processed Cas12a crRNA that has had the 3′ extension nucleotides excised.

[0097] In another aspect, the invention provides a third engineered system including: (a) one or more nucleotide sequences encoding a Cas12a nuclease; and (b) one or more nucleotide sequences encoding at least one engineered Cas12a crRNA that is designed to form a complex with the Cas12a nuclease and that includes a spacer sequence designed to hybridize with a target sequence in a eukaryotic cell; and (c) one or more nucleotide sequences encoding at least one Cas12a tracrRNA.

[0098] In another aspect, the invention provides a fourth engineered system including: (a) a Cas12a nuclease, or one or more DNA or RNA nucleotide sequences encoding the Cas12a nuclease; and (b) at least one engineered Cas12a crRNA designed to form a complex with the Cas12a nuclease and including a spacer sequence designed to hybridize with a target sequence in a eukaryotic cell, or one or more DNA or RNA nucleotide sequences encoding the at least one engineered Cas12a crRNA polynucleotide; and (c) at least one tracrRNA, or one or more DNA or RNA nucleotide sequences encoding the at least one Cas12a tracrRNA.

[0099] In embodiments of the third or fourth engineered systems, the Cas12a nuclease is (a) a Cas12a nuclease identified from the genome of a bacterial species selected from the group consisting of Francisella tularensis 1, Prevotella albensis, Lachnospiraceae bacterium MC2017 1, Butyrivibrio proteoclasticus, Peregrinibacteria bacterium GW2011_GWA2_33_10, Parcubacteria bacterium GW2011_GWC2_44_17, Smithella sp. SCADC, Acidaminococcus sp. BV3L6, Lachnospiraceae bacterium MA2020, Candidatus Methanoplasma termitum, Eubacterium eligens, Moraxella bovoculi 237, Leptospira inadai, Lachnospiraceae bacterium ND2006, Porphyromonas crevioricanis 3, Prevotella disiens and Porphyromonas macacae; or (b) a Cas12a nuclease selected from the group consisting of LbCas12a, AsCas12a, FnCas12a, and a deactivated Cas12a nuclease; or (c) a Cas12a nuclease having at least 80% sequence identity with a sequence selected from the group consisting of SEQ ID NOs:11, 107-138, 172, 204-221, and 222; or (d) a Cas12a nuclease variant selected from the group consisting of (1) a variant LbCpf1 that differs from a wild-type LbCpf1 sequence (SEQ ID NO:135) in containing at least one point mutation selected from the group consisting of G309P, Y312F, M4741, D523N, Q531K, C930A, D937N, V954F/Q, M975L, A984E, I994L, T1006K, I1014V, V1055N/D, L1065F/Y, Y1180F, V1209G, I1229L, V801I, Y802I, D850A, E943A, and D1198A; (2) a variant AsCpf1 that differs from a wild-type AsCpf1 sequence (SEQ ID NO:134) in containing at least one point mutation selected from the group consisting of L320P, V980A, Q987N, T1004F/Q, K1035E, T1057K, D1107N, F1117Y, N1291L, D908A, E993A, and D1263A; and (3) a variant FnCpf1 that differs from a wild-type FnCpf1 sequence (SEQ ID NO:172) in containing at least one point mutation selected from the group consisting of I339P, L342F, Q588K, F1017Q, K1047E, N1118D, F1128Y, L867I, D917A, E1006A, and D1255A. In embodiments, the Cas12a nuclease is deactivated. In embodiments, the Cas12a nuclease includes at least one modification selected from the group consisting of: (a) a localization signal (e.g., a nuclear localization signal, a mitochondrial localization signal, or a plastid localization signal); (b) a detectable label (e.g., a fluorescent dye); (c) a cell-penetrating peptide; (d) an endosomal escape peptide; and (e) an affinity tag. The systems including a tracrRNA as disclosed herein can also be employed with related Cas nucleases, including Csm nucleases, e.g., ObCsm1 (GenBank accession number OGX23684), SmCsm1 (GenBank accession number KF067988), MiCsm1 (GenBank accession number KKQ38176), or SuCsm1 (GenBank accession number KIM12007) (see, e.g., Begemann et al. (2017) bioRxiv, publicly available at dx[dot]doi[dot]org/10[dot]1101/192799), nucleases having a sequence selected from the group consisting of SEQ ID NOs:115, 137, 138, and variants thereof, such as a variant ObCsm1 that differs from a wild-type ObCsm1 sequence (SEQ ID NO:137) in containing at least one point mutation selected from the group consisting of K382N, Q393K, S925A, E933N, K943F/Q, K972L, K1064G, P670I, N671I, D727A, E939A, and D1053A.

[0100] In embodiments of the third or fourth engineered systems, the engineered Cas12a crRNA includes a spacer sequence that is designed to hybridize with a target sequence in a eukaryotic cell. Target sequences and eukaryotic cells are described in detail below under the section headed “Related Disclosure”. In embodiments of the third or fourth engineered systems, the “polynucleotide encoding the engineered Cas12a crRNA” is a naturally occurring polynucleotide, e.g., a pre-processed transcript that includes at least the Cas12a crRNA and often includes additional nucleotides that are removed during processing. In embodiments of the third or fourth engineered systems, the “polynucleotide encoding the engineered Cas12a crRNA” is an engineered or recombinant polynucleotide. In embodiments of the third or fourth engineered systems, the at least one engineered Cas12a crRNA, or a polynucleotide encoding the at least one engineered Cas12a crRNA, further includes at least one direct repeat sequence or fragment thereof capable of associating with the Cas12a nuclease, wherein the at least one direct repeat sequence or fragment thereof is adjacent to and 3′ to the spacer sequence. In embodiments of the third or fourth engineered systems, the engineered Cas12a crRNA, or a polynucleotide encoding the engineered Cas12a crRNA, further includes at least one direct repeat sequence or fragment thereof capable of associating with the Cas12a nuclease, wherein the at least one direct repeat sequence or fragment thereof is adjacent to and 3′ to the spacer sequence. In embodiments of the third or fourth engineered systems where the engineered Cas12a crRNA further includes at least one direct repeat sequence or fragment thereof capable of associating with the Cas12a nuclease, wherein the at least one direct repeat sequence or fragment thereof is adjacent to and 3′ to the spacer sequence, the Cas12a tracrRNA has a nucleotide sequence that has at least about 50% or preferably greater than 50% complementarity to the at least one direct repeat sequence or fragment adjacent to and 3′ to the spacer sequence. In embodiments of the third or fourth engineered systems, the engineered Cas12a crRNA further includes a 3′ extension adjacent to the spacer sequence; in some embodiments, the 3′ extension includes nucleotides that when base-paired form about one helical turn; in some embodiments, the 3′ extension includes at least 10 contiguous nucleotides. In embodiments of the third or fourth engineered systems where the engineered Cas12a crRNA further includes a 3′ extension adjacent to the spacer sequence, the Cas12a tracrRNA has a nucleotide sequence having sufficient complementarity (e.g., about 50% or greater than 50%) to the engineered Cas12a crRNA's 3′ extension to allow hybridization between the Cas12a tracrRNA and the engineered Cas12a crRNA.

[0101] In embodiments of the third or fourth engineered systems, the at least one tracrRNA, or the one or more nucleotide sequences encoding the at least one Cas12a tracrRNA, includes a nucleotide sequence that has at least 50% complementarity with, the nucleotide sequence of the at least one direct repeat of the engineered Cas12a crRNA. In embodiments of the third or fourth engineered systems, the at least one tracrRNA, or the one or more nucleotide sequences encoding the at least one Cas12a tracrRNA, includes a nucleotide sequence of a naturally occurring putative Cas12a tracrRNA sequence identified from a native Cas12a locus, such as a nucleotide sequence of a naturally occurring putative Cas12a tracrRNA sequence identified from a genome using the techniques described by Zetsche et al. (2015) Cell, 163:759-771, and in U.S. Pat. No. 9,790,490. A naturally occurring putative Cas12a tracrRNA sequence can be identified from a genome as DNA sequence encoding a RNA molecule that: is predicted to be or putatively transcribed (or that may be determined to be transcribed, e.g., by RNA analysis) from a Cas12a CRISPR genomic region, specifically from a locus that flanks the DNA encoding the Cas12a CRISPR nuclease; that preferably includes a predicted transcriptional terminator in the direction of transcription; that is about 60 to about 100 nucleotides in length, e.g., 60-80 nucleotides, 60-85 nucleotides, 60-90 nucleotides, or 65-95 nucleotides; and that is not a direct repeat in the Cas12a CRISPR array, but rather has a nucleotide sequence that permits the transcribed tracrRNA to hybridize to the crRNA (i.e., the naturally occurring putative Cas12a tracrRNA sequence has sufficient complementarity to a crRNA sequence to hybridize to the crRNA). In embodiments, the Cas12a tracrRNA locus is directly adjacent to the DNA encoding the Cas12a nuclease. In embodiments, there is additional genomic sequence, such as DNA sequence encoding other Cas nucleases, located between the Cas12a tracrRNA locus and the DNA encoding the Cas12a nuclease; see, e.g., FIGS. 1 and 4. In embodiments of the third or fourth engineered systems, the at least one tracrRNA, or the one or more nucleotide sequences encoding the at least one Cas12a tracrRNA, has a nucleotide sequence having at least 50% identity (e.g., at least 50%, at least 51%, at least 52%, at least 53%, at least 54%, at least 55%, at least 56%, at least 57%, at least 58%, at least 59%, or at least 60% sequence identity) to the sequence of the direct repeat. In embodiments of the third or fourth engineered systems, the at least one tracrRNA, or the one or more nucleotide sequences encoding the at least one Cas12a tracrRNA, has a nucleotide sequence including a sequence selected from the group consisting of SEQ ID NOs:1, 3, 6, 139-146, 149-169, 223-240, and 241. An alternative embodiment of a “Cas12a tracrRNA” includes an RNA molecule having or including a nucleotide sequence based on the nucleotide sequence of a naturally occurring putative Cas12a tracrRNA sequence identified from a native Cas12a locus. Examples include RNA molecules that include the nucleotide sequence of a naturally occurring putative Cas12a tracrRNA sequence identified from a native Cas12a locus but that further include one or more modifications such as (a) additional nucleotides, e.g., an extension at the 3′ terminus, (b) insertion, deletion, or substitution of one or more nucleotides within the naturally occurring tracrRNA sequence, preferably maintaining the secondary structure of the tracrRNA, and (c) chemical modifications, e.g., addition of a detectable label. In embodiments of the third or fourth engineered systems, the at least one tracrRNA, or the one or more nucleotide sequences encoding the at least one Cas12a tracrRNA, further includes a 5′ extension, such as the 5′ extensions disclosed by Park et al. (2018) Nature Communications, doi: 10.1038/s41467-018-05641-3.

[0102] In another aspect, the invention provides a fifth engineered system including one or more vectors including: (a) a first regulatory element that is heterologous to and operably linked to one or more nucleotide sequences encoding a Cas12a nuclease; and (b) a second regulatory element that is heterologous to and operably linked to one or more nucleotide sequences encoding at least one engineered Cas12a crRNA that is designed to form a complex with the Cas12a nuclease and that includes a spacer sequence designed to hybridize with a target sequence in a eukaryotic cell; and (c) a third regulatory element that is heterologous to and operably linked to one or more nucleotide sequences encoding at least one Cas12a tracrRNA; wherein components (a) and (b) and (c) are located on the same vector or on different vectors of the system.

[0103] In embodiments of the fifth engineered system, the first regulatory element, the second regulatory element, and the third regulatory element each include a promoter that is functional in the eukaryotic cell. Each promoter is selected for operability in the context (in vitro or in vivo) in which the DNA expression system is to be used. Thus, in embodiments, the first regulatory element, the second regulatory element, and the third regulatory element each include a promoter that functions in prokaryotic cells, such as in bacterial cells. In preferred embodiments, the first regulatory element, the second regulatory element, and the third regulatory element each include a promoter that functions in eukaryotic cells, such as in non-human animal (e.g., mammalian, human) or human or plant or fungal cells; in embodiments, the first regulatory element, the second regulatory element, and the third regulatory element each include a promoter identified from a eukaryotic genome, such as a non-human animal or human or plant or fungal genome. In embodiments of the fifth engineered system, any one or more of the regulatory elements also includes other elements that regulate expression, such as, but not limited to, enhancers and introns, examples of which are provided in Table 3. In embodiments of the fifth engineered system, the first regulatory element, the second regulatory element, and the third regulatory element each include a promoter selected from the group consisting of pol III promoters, pol II promoters, and pol I promoters. In embodiments of the fifth engineered system, the first regulatory element, the second regulatory element, and the third regulatory element each include a promoter selected from the group consisting of a U6 promoter, an H1 promoter, a Rous sarcoma virus (RSV) LTR promoter, a cytomegalovirus (CMV) promoter, an SV40 promoter, a dihydrofolate reductase promoter, a beta-actin promoter, a phosphoglycerol kinase (PGK) promoter, and an EF1a promoter. In embodiments, the first regulatory element, the second regulatory element, and the third regulatory element each include a promoter selected from the group consisting of pol III promoters, pol II promoters, and pol I promoters. In embodiments, the first regulatory element, the second regulatory element, and the third regulatory element each include a promoter selected from the group consisting of a U6 promoter, an H1 promoter, a Rous sarcoma virus (RSV) LTR promoter, a cytomegalovirus (CMV) promoter, an SV40 promoter, a dihydrofolate reductase promoter, a beta-actin promoter, a phosphoglycerol kinase (PGK) promoter, an EF1a promoter. In embodiments, the first regulatory element, the second regulatory element, and the third regulatory element each include a promoter that functions in eukaryotic cells, such as in plant cells. For use in plants, useful promoters include constitutive, conditional, inducible, and temporally or spatially specific promoters (e.g., a tissue specific promoter, a developmentally regulated promoter, or a cell cycle regulated promoter). In embodiments, the promoter is a pol II promoter. In embodiments, the promoter is a constitutive promoter that drives DNA expression in plant cells; in embodiments, the promoter drives DNA expression in the nucleus or in an organelle such as a chloroplast or mitochondrion. Examples of constitutive promoters include a CaMV 35S promoter as disclosed in U.S. Pat. Nos. 5,858,742 and 5,322,938, a rice actin promoter as disclosed in U.S. Pat. No. 5,641,876, a maize chloroplast aldolase promoter as disclosed in U.S. Pat. No. 7,151,204, and an opaline synthase (NOS) and octapine synthase (OCS) promoter from Agrobacterium tumefaciens. In embodiments, the promoter is a promoter from figwort mosaic virus (FMV), a RUBISCO promoter, or a pyruvate phosphate dikinase (PDK) promoter, which is active in the chloroplasts of mesophyll cells. Other contemplated promoters include cell-specific or tissue-specific or developmentally regulated promoters, for example, a promoter that limits the expression of the DNA expression system to germline or reproductive cells (e.g., promoters of genes encoding DNA ligases, recombinases, replicases, or other genes specifically expressed in germline or reproductive cells). In embodiments, the first regulatory element, the second regulatory element, and/or the third regulatory element includes a plant U6 spliceosomal RNA promoter, which can be native to the genome of the plant cell or from a different species, e.g., a U6 promoter from maize, tomato, or soybean such as those disclosed in U.S. patent application Ser. No. 15/120,110, published as U.S. Patent Application Publication 2017/0166912, national phase application claiming priority to PCT/US2015/018104 (published as WO 2015/131101 and claiming priority to U.S. Provisional Patent Application 61/945,700), or a homologue thereof; in an embodiment of the fifth engineered system, such a promoter is operably linked to DNA sequence encoding one or more nucleotide sequences encoding at least one Cas12a tracrRNA, followed by a suitable 3′ element such as a U6 poly-T terminator. In another embodiment, the first promoter is a plant U3, 7SL (signal recognition particle RNA), U2, or U5 promoter, or chimerics thereof, e.g., as described in U.S. patent application Ser. No. 15/120,110, published as U.S. Patent Application Publication 2017/0166912, national phase application claiming priority to PCT/US2015/018104 (published as WO 2015/131101 and claiming priority to U.S. Provisional Patent Application 61/945,700). All of the patent publications referenced in this paragraph are incorporated herein by reference in their entirety. In embodiments of the fifth engineered system, the eukaryotic cell is a plant cell, and wherein the third regulatory element includes a promoter having a nucleotide sequence selected from the group consisting of SEQ ID NOs:16-71. In embodiments of the fifth engineered system, the at least one Cas12a tracrRNA is at least one Cas12a tracrRNA having a nucleotide sequence including a sequence selected from the group consisting of SEQ ID NOs:1, 3, 6, 139-146, 149-169, 223-240, and 241. In specific embodiments of the fifth engineered system, the eukaryotic cell is a plant cell, the third regulatory element includes a promoter having a nucleotide sequence selected from the group consisting of SEQ ID NOs:16-71, and the at least one Cas12a tracrRNA is at least one Cas12a tracrRNA having a nucleotide sequence including a sequence selected from the group consisting of SEQ ID NOs:1, 3, 6, 139-146, 149-169, 223-240, and 241.

[0104] In embodiments of the fifth engineered system, the Cas12a nuclease is (a) a Cas12a nuclease identified from the genome of a bacterial species selected from the group consisting of Francisella tularensis 1, Prevotella albensis, Lachnospiraceae bacterium MC2017 1, Butyrivibrio proteoclasticus, Peregrinibacteria bacterium GW2011_GWA2_33_10, Parcubacteria bacterium GW2011_GWC2_44_17, Smithella sp. SCADC, Acidaminococcus sp. BV3L6, Lachnospiraceae bacterium MA2020, Candidatus Methanoplasma termitum, Eubacterium eligens, Moraxella bovoculi 237, Leptospira inadai, Lachnospiraceae bacterium ND2006, Porphyromonas crevioricanis 3, Prevotella disiens and Porphyromonas macacae; or (b) a Cas12a nuclease selected from the group consisting of LbCas12a, AsCas12a, FnCas12a, and a deactivated Cas12a nuclease; or (c) a Cas12a nuclease having at least 80% sequence identity with a sequence selected from the group consisting of SEQ ID NOs:11, 107-138, 172, 204-221, and 222; or (d) a Cas12a nuclease variant selected from the group consisting of (1) a variant LbCpf1 that differs from a wild-type LbCpf1 sequence (SEQ ID NO:135) in containing at least one point mutation selected from the group consisting of G309P, Y312F, M4741, D523N, Q531K, C930A, D937N, V954F/Q, M975L, A984E, I994L, T1006K, I1014V, V1055N/D, L1065F/Y, Y1180F, V1209G, I1229L, V801I, Y802I, D850A, E943A, and D1198A; (2) a variant AsCpf1 that differs from a wild-type AsCpf1 sequence (SEQ ID NO:134) in containing at least one point mutation selected from the group consisting of L320P, V980A, Q987N, T1004F/Q, K1035E, T1057K, D1107N, F1117Y, N1291L, D908A, E993A, and D1263A; and (3) a variant FnCpf1 that differs from a wild-type FnCpf1 sequence (SEQ ID NO:172) in containing at least one point mutation selected from the group consisting of I339P, L342F, Q588K, F1017Q, K1047E, N1118D, F1128Y, L867I, D917A, E1006A, and D1255A. In embodiments, the Cas12a nuclease is deactivated. In embodiments, the Cas12a nuclease includes at least one modification selected from the group consisting of: (a) a localization signal (e.g., a nuclear localization signal, a mitochondrial localization signal, or a plastid localization signal); (b) a detectable label (e.g., a fluorescent dye); (c) a cell-penetrating peptide; (d) an endosomal escape peptide; and (e) an affinity tag. The systems including a tracrRNA as disclosed herein can also be employed with related Cas nucleases, including Csm nucleases, e.g., ObCsm1 (GenBank accession number OGX23684), SmCsm1 (GenBank accession number KF067988), MiCsm1 (GenBank accession number KKQ38176), or SuCsm1 (GenBank accession number KIM12007) (see, e.g., Begemann et al. (2017) bioRxiv, publicly available at dx[dot]doi[dot]org/10[dot]1101/192799), nucleases having a sequence selected from the group consisting of SEQ ID NOs:115, 137, 138, and variants thereof, such as a variant ObCsm1 that differs from a wild-type ObCsm1 sequence (SEQ ID NO:137) in containing at least one point mutation selected from the group consisting of K382N, Q393K, S925A, E933N, K943F/Q, K972L, K1064G, P670I, N671I, D727A, E939A, and D1053A.

[0105] In embodiments of the fifth engineered system, the at least one engineered Cas12a crRNA includes a spacer sequence designed to hybridize with a target sequence in a eukaryotic cell. Target sequences and eukaryotic cells are described in detail below under the section headed “Related Disclosure”. In embodiments of the fifth engineered system, the at least one engineered Cas12a crRNA, or the one or more nucleotide sequences encoding the at least one engineered Cas12a crRNA, further includes at least one direct repeat sequence or fragment thereof that is capable of associating with the Cas12a nuclease and is adjacent to and 5′ to the spacer sequence. In embodiments of the fifth engineered system, the engineered Cas12a crRNA, or a polynucleotide encoding the engineered Cas12a crRNA, further includes at least one direct repeat sequence or fragment thereof capable of associating with the Cas12a nuclease, wherein the at least one direct repeat sequence or fragment thereof is adjacent to and 3′ to the spacer sequence. In embodiments of the fifth engineered system where the engineered Cas12a crRNA further includes at least one direct repeat sequence or fragment thereof capable of associating with the Cas12a nuclease, wherein the at least one direct repeat sequence or fragment thereof is adjacent to and 3′ to the spacer sequence, the Cas12a tracrRNA has a nucleotide sequence that has at least about 50% or preferably greater than 50% complementarity to the at least one direct repeat sequence or fragment adjacent to and 3′ to the spacer sequence. In embodiments of the fifth engineered system, the engineered Cas12a crRNA further includes a 3′ extension adjacent to the spacer sequence; in some embodiments, the 3′ extension includes nucleotides that when base-paired form about one helical turn; in some embodiments, the 3′ extension includes at least 10 contiguous nucleotides. In embodiments of the fifth engineered system where the engineered Cas12a crRNA further includes a 3′ extension adjacent to the spacer sequence, the Cas12a tracrRNA has a nucleotide sequence having sufficient complementarity (e.g., about 50% or greater than 50%) to the engineered Cas12a crRNA's 3′ extension to allow hybridization between the Cas12a tracrRNA and the engineered Cas12a crRNA.

[0106] In embodiments of the fifth engineered system, the at least one tracrRNA, or the one or more nucleotide sequences encoding at least one Cas12a tracrRNA, includes a nucleotide sequence that has at least 50% complementarity with, the nucleotide sequence of a direct repeat sequence or fragment thereof that is capable of associating with the Cas12a nuclease and is adjacent to and 5′ to the spacer sequence of the engineered Cas12a crRNA. In embodiments of the fifth engineered system, the at least one tracrRNA, or the one or more nucleotide sequences encoding the at least one Cas12a tracrRNA, includes a nucleotide sequence of a naturally occurring putative Cas12a tracrRNA sequence identified from a native Cas12a locus, such as a nucleotide sequence of a naturally occurring putative Cas12a tracrRNA sequence identified from a genome using the techniques described by Zetsche et al. (2015) Cell, 163:759-771, and in U.S. Pat. No. 9,790,490. A naturally occurring putative Cas12a tracrRNA sequence can be identified from a genome as DNA sequence encoding a RNA molecule that: is predicted to be or putatively transcribed (or that may be determined to be transcribed, e.g., by RNA analysis) from a Cas12a CRISPR genomic region, specifically from a locus that flanks the DNA encoding the Cas12a CRISPR nuclease; that preferably includes a predicted transcriptional terminator in the direction of transcription; that is about 60 to about 100 nucleotides in length, e.g., 60-80 nucleotides, 60-85 nucleotides, 60-90 nucleotides, or 65-95 nucleotides; and that is not a direct repeat in the Cas12a CRISPR array, but rather has a nucleotide sequence that permits the transcribed tracrRNA to hybridize to the crRNA (i.e., the naturally occurring putative Cas12a tracrRNA sequence has sufficient complementarity to a crRNA sequence to hybridize to the crRNA). In embodiments, the Cas12a tracrRNA locus is directly adjacent to the DNA encoding the Cas12a nuclease. In embodiments, there is additional genomic sequence, such as DNA sequence encoding other Cas nucleases, located between the Cas12a tracrRNA locus and the DNA encoding the Cas12a nuclease; see, e.g., FIGS. 1 and 4. In embodiments of the fifth engineered system, the at least one tracrRNA, or the one or more nucleotide sequences encoding the at least one Cas12a tracrRNA, has a nucleotide sequence having at least 50% identity (e.g., at least 50%, at least 51%, at least 52%, at least 53%, at least 54%, at least 55%, at least 56%, at least 57%, at least 58%, at least 59%, or at least 60% sequence identity) to the sequence of the direct repeat. In embodiments of the fifth engineered system, the at least one tracrRNA, or the one or more nucleotide sequences encoding the at least one Cas12a tracrRNA, has a nucleotide sequence including a sequence selected from the group consisting of SEQ ID NOs:1, 3, 6, 139-146, 149-169, 223-240, and 241. An alternative embodiment of a “Cas12a tracrRNA” includes an RNA molecule having or including a nucleotide sequence based on the nucleotide sequence of a naturally occurring putative Cas12a tracrRNA sequence identified from a native Cas12a locus. Examples include RNA molecules that include the nucleotide sequence of a naturally occurring putative Cas12a tracrRNA sequence identified from a native Cas12a locus but that further include one or more modifications such as (a) additional nucleotides, e.g., an extension at the 3′ terminus, (b) insertion, deletion, or substitution of one or more nucleotides within the naturally occurring tracrRNA sequence, preferably maintaining the secondary structure of the tracrRNA, and (c) chemical modifications, e.g., addition of a detectable label. In embodiments of the fifth engineered system, the at least one tracrRNA, or the one or more nucleotide sequences encoding the at least one Cas12a tracrRNA, further includes a 5′ extension, such as the 5′ extensions disclosed by Park et al. (2018) Nature Communications, doi: 10.1038/s41467-018-05641-3.

[0107] Another aspect of the invention provides a sixth engineered system including one or more vectors including: (a) a first expression cassette including at least a first promoter that is heterologous to and operably linked to one or more nucleotide sequences encoding a Cas12a nuclease and—optionally—a first transcription terminator sequence; and (b) a second expression cassette including at least a second promoter that is heterologous to operably linked to one or more nucleotide sequences encoding at least one engineered Cas12a crRNA that is designed to form a complex with the Cas12a nuclease and that includes a spacer sequence designed to hybridize with a target sequence in a eukaryotic cell and—optionally—a second transcription terminator sequence; and (c) a third expression cassette including at least a third promoter that is heterologous to operably linked to one or more nucleotide sequences encoding at least one Cas12a tracrRNA and—optionally—a third transcription terminator sequence, wherein components (a) and (b) and (c) are located on the same vector or on different vectors of the system.

[0108] In embodiments of the sixth engineered system, the first promoter, the second promoter, and the third promoter are each a promoter that is functional in the eukaryotic cell, and wherein the first transcription terminator, the second transcription terminator, and the third transcription terminator are each a transcription terminator that is functional in the eukaryotic cell. In embodiments, the first promoter, the second promoter, and the third promoter are each a promoter selected from the group consisting of pol III promoters, pol II promoters, and pol I promoters. In embodiments of the sixth engineered system, the first promoter, the second promoter, and the third promoter are each a promoter selected from the group consisting of a U6 promoter, an H1 promoter, a Rous sarcoma virus (RSV) LTR promoter, a cytomegalovirus (CMV) promoter, an SV40 promoter, a dihydrofolate reductase promoter, a beta-actin promoter, a phosphoglycerol kinase (PGK) promoter, an EF1a promoter. In embodiments of the sixth engineered system, the first promoter, the second promoter, and the third promoter are each a promoter with a nucleotide sequence selected from the group consisting of SEQ ID NOs:16-71. In embodiments of the sixth engineered system, the first transcription terminator, the second transcription terminator, and the third transcription terminator are each selected from the group consisting of a U6 poly-T terminator, an SV40 terminator, an hGH terminator, a BGH terminator, an rbGlob terminator, a synthetic terminator functional in a eukaryotic cell, a 3′ element from an Agrobacterium sp. gene, a 3′ element from a non-human animal gene, a 3′ element from a human gene, and a 3′ element from a plant gene, wherein the 3′ element terminate transcription of an RNA transcript located immediately 5′ to the 3′ element. In embodiments of the sixth engineered system, the first transcription terminator, the second transcription terminator, and the third transcription terminator are each a transcription terminator having a sequence selected from the group consisting of SEQ ID NOs:72-100 or comprise a U6 poly-T terminator, an SV40 terminator, an hGH terminator, a BGH terminator, an rbGlob terminator, or a synthetic terminator functional in a eukaryotic cell.

[0109] In embodiments of the sixth engineered system, the Cas12a nuclease is (a) a Cas12a nuclease identified from the genome of a bacterial species selected from the group consisting of Francisella tularensis 1, Prevotella albensis, Lachnospiraceae bacterium MC2017 1, Butyrivibrio proteoclasticus, Peregrinibacteria bacterium GW2011GWA2_33_10, Parcubacteria bacterium GW2011_GWC2_44_17, Smithella sp. SCADC, Acidaminococcus sp. BV3L6, Lachnospiraceae bacterium MA2020, Candidatus Methanoplasma termitum, Eubacterium eligens, Moraxella bovoculi 237, Leptospira inadai, Lachnospiraceae bacterium ND2006, Porphyromonas crevioricanis 3, Prevotella disiens and Porphyromonas macacae; or (b) a Cas12a nuclease selected from the group consisting of LbCas12a, AsCas12a, FnCas12a, and a deactivated Cas12a nuclease; or (c) a Cas12a nuclease having at least 80% sequence identity with a sequence selected from the group consisting of SEQ ID NOs:11, 107-138, 172, 204-221, and 222; or (d) a Cas12a nuclease variant selected from the group consisting of (1) a variant LbCpf1 that differs from a wild-type LbCpf1 sequence (SEQ ID NO:135) in containing at least one point mutation selected from the group consisting of G309P, Y312F, M4741, D523N, Q531K, C930A, D937N, V954F/Q, M975L, A984E, I994L, T1006K, I1014V, V1055N/D, L1065F/Y, Y1180F, V1209G, I1229L, V801I, Y802I, D850A, E943A, and D1198A; (2) a variant AsCpf1 that differs from a wild-type AsCpf1 sequence (SEQ ID NO:134) in containing at least one point mutation selected from the group consisting of L320P, V980A, Q987N, T1004F/Q, K1035E, T1057K, D1107N, F1117Y, N1291L, D908A, E993A, and D1263A; and (3) a variant FnCpf1 that differs from a wild-type FnCpf1 sequence (SEQ ID NO:172) in containing at least one point mutation selected from the group consisting of I339P, L342F, Q588K, F1017Q, K1047E, N1118D, F1128Y, L867I, D917A, E1006A, and D1255A. In embodiments, the Cas12a nuclease is deactivated. In embodiments, the Cas12a nuclease includes at least one modification selected from the group consisting of: (a) a localization signal (e.g., a nuclear localization signal, a mitochondrial localization signal, or a plastid localization signal); (b) a detectable label (e.g., a fluorescent dye); (c) a cell-penetrating peptide; (d) an endosomal escape peptide; and (e) an affinity tag. The systems including a tracrRNA as disclosed herein can also be employed with related Cas nucleases, including Csm nucleases, e.g., ObCsm1 (GenBank accession number OGX23684), SmCsm1 (GenBank accession number KF067988), MiCsm1 (GenBank accession number KKQ38176), or SuCsm1 (GenBank accession number KIM12007) (see, e.g., Begemann et al. (2017) bioRxiv, publicly available at dx[dot]doi[dot]org/10[dot]1101/192799), nucleases having a sequence selected from the group consisting of SEQ ID NOs:115, 137, 138, and variants thereof, such as a variant ObCsm1 that differs from a wild-type ObCsm1 sequence (SEQ ID NO:137) in containing at least one point mutation selected from the group consisting of K382N, Q393K, S925A, E933N, K943F/Q, K972L, K1064G, P670I, N671I, D727A, E939A, and D1053A.

[0110] In embodiments of the sixth engineered system, the at least one tracrRNA, or the one or more nucleotide sequences encoding at least one Cas12a tracrRNA, includes a nucleotide sequence that has at least 50% complementarity with, the nucleotide sequence of a direct repeat sequence or fragment thereof that is capable of associating with the Cas12a nuclease and is adjacent to and 5′ to the spacer sequence of the engineered Cas12a crRNA. In embodiments of the sixth engineered system, the at least one tracrRNA, or the one or more nucleotide sequences encoding the at least one Cas12a tracrRNA, includes a nucleotide sequence of a naturally occurring putative Cas12a tracrRNA sequence identified from a native Cas12a locus, such as a nucleotide sequence of a naturally occurring putative Cas12a tracrRNA sequence identified from a genome using the techniques described by Zetsche et al. (2015) Cell, 163:759-771, and in U.S. Pat. No. 9,790,490. A naturally occurring putative Cas12a tracrRNA sequence can be identified from a genome as DNA sequence encoding a RNA molecule that: is predicted to be or putatively transcribed (or that may be determined to be transcribed, e.g., by RNA analysis) from a Cas12a CRISPR genomic region, specifically from a locus that flanks the DNA encoding the Cas12a CRISPR nuclease; that preferably includes a predicted transcriptional terminator in the direction of transcription; that is about 60 to about 100 nucleotides in length, e.g., 60-80 nucleotides, 60-85 nucleotides, 60-90 nucleotides, or 65-95 nucleotides; and that is not a direct repeat in the Cas12a CRISPR array, but rather has a nucleotide sequence that permits the transcribed tracrRNA to hybridize to the crRNA (i.e., the naturally occurring putative Cas12a tracrRNA sequence has sufficient complementarity to a crRNA sequence to hybridize to the crRNA). In embodiments, the Cas12a tracrRNA locus is directly adjacent to the DNA encoding the Cas12a nuclease. In embodiments, there is additional genomic sequence, such as DNA sequence encoding other Cas nucleases, located between the Cas12a tracrRNA locus and the DNA encoding the Cas12a nuclease; see, e.g., FIGS. 1 and 4. In embodiments of the sixth engineered system, the at least one tracrRNA, or the one or more nucleotide sequences encoding the at least one Cas12a tracrRNA, has a nucleotide sequence having at least 50% identity (e.g., at least 50%, at least 51%, at least 52%, at least 53%, at least 54%, at least 55%, at least 56%, at least 57%, at least 58%, at least 59%, or at least 60% sequence identity) to the sequence of the direct repeat. In embodiments of the sixth engineered system, the at least one tracrRNA, or the one or more nucleotide sequences encoding the at least one Cas12a tracrRNA, has a nucleotide sequence including a sequence selected from the group consisting of SEQ ID NOs:1, 3, 6, 139-146, 149-169, 223-240, and 241. An alternative embodiment of a “Cas12a tracrRNA” includes an RNA molecule having or including a nucleotide sequence based on the nucleotide sequence of a naturally occurring putative Cas12a tracrRNA sequence identified from a native Cas12a locus. Examples include RNA molecules that include the nucleotide sequence of a naturally occurring putative Cas12a tracrRNA sequence identified from a native Cas12a locus but that further include one or more modifications such as (a) additional nucleotides, e.g., an extension at the 3′ terminus, (b) insertion, deletion, or substitution of one or more nucleotides within the naturally occurring tracrRNA sequence, preferably maintaining the secondary structure of the tracrRNA, and (c) chemical modifications, e.g., addition of a detectable label. In embodiments of the sixth engineered system, the at least one tracrRNA, or the one or more nucleotide sequences encoding the at least one Cas12a tracrRNA, further includes a 5′ extension, such as the 5′ extensions disclosed by Park et al. (2018) Nature Communications, doi: 10.1038/s41467-018-05641-3.

[0111] In embodiments of the sixth engineered system, the at least one engineered Cas12a crRNA includes a spacer sequence designed to hybridize with a target sequence in a eukaryotic cell. Target sequences and eukaryotic cells are described in detail below under the section headed “Related Disclosure”. In embodiments, the eukaryotic cell is a non-human animal cell, a human cell, a plant cell, or a fungal cell. In embodiments of the sixth engineered system, the eukaryotic cell is in vitro, ex vivo, or in vivo.

### Disclosure Related to the Engineered Systems

[0112] The disclosure of this section is related to embodiments of the first, second, third, fourth, fifth, and sixth engineered systems.

[0113] In embodiments of any one of the first, second, third, fourth, fifth, and sixth engineered systems, the Cas12a nuclease is: (a) a Cas12a nuclease identified from the genome of a bacterial species selected from the group consisting of Francisella tularensis 1, Prevotella albensis, Lachnospiraceae bacterium MC2017 1, Butyrivibrio proteoclasticus, Peregrinibacteria bacterium GW2011_GWA2_33_10, Parcubacteria bacterium GW2011_GWC2_44_17, Smithella sp. SCADC, Acidaminococcus sp. BV3L6, Lachnospiraceae bacterium MA2020, Candidatus Methanoplasma termitum, Eubacterium eligens, Moraxella bovoculi 237, Leptospira inadai, Lachnospiraceae bacterium ND2006, Porphyromonas crevioricanis 3, Prevotella disiens and Porphyromonas macacae; or (b) a Cas12a nuclease selected from the group consisting of LbCas12a, AsCas12a, FnCas12a, and a deactivated Cas12a nuclease; or (c) a Cas12a nuclease having at least 80% sequence identity with a sequence selected from the group consisting of SEQ ID NOs:11, 107-138, 172, 204-221, and 222; or (d) a Cas12a nuclease variant selected from the group consisting of (1) a variant LbCpf1 that differs from a wild-type LbCpf1 sequence (SEQ ID NO:135) in containing at least one point mutation selected from the group consisting of G309P, Y312F, M4741, D523N, Q531K, C930A, D937N, V954F/Q, M975L, A984E, I994L, T1006K, I1014V, V1055N/D, L1065F/Y, Y1180F, V1209G, I1229L, V801I, Y802I, D850A, E943A, and D1198A; (2) a variant AsCpf1 that differs from a wild-type AsCpf1 sequence (SEQ ID NO:134) in containing at least one point mutation selected from the group consisting of L320P, V980A, Q987N, T1004F/Q, K1035E, T1057K, D1107N, F1117Y, N1291L, D908A, E993A, and D1263A; and (3) a variant FnCpf1 that differs from a wild-type FnCpf1 sequence (SEQ ID NO:172) in containing at least one point mutation selected from the group consisting of I339P, L342F, Q588K, F1017Q, K1047E, N1118D, F1128Y, L867I, D917A, E1006A, and D1255A. In embodiments, the Cas12a nuclease is deactivated. In embodiments, the Cas12a nuclease includes at least one modification selected from the group consisting of: (a) a localization signal (e.g., a nuclear localization signal, a mitochondrial localization signal, or a plastid localization signal); (b) a detectable label (e.g., a fluorescent dye); (c) a cell-penetrating peptide; (d) an endosomal escape peptide; and (e) an affinity tag. The systems including a tracrRNA as disclosed herein can also be employed with related Cas nucleases, including Csm nucleases, e.g., ObCsm1 (GenBank accession number OGX23684), SmCsm1 (GenBank accession number KF067988), MiCsm1 (GenBank accession number KKQ38176), or SuCsm1 (GenBank accession number KIM12007) (see, e.g., Begemann et al. (2017) bioRxiv, publicly available at dx[dot]doi[dot]org/10[dot]1101/192799), nucleases having a sequence selected from the group consisting of SEQ ID NOs:115, 137, 138, and variants thereof, such as a variant ObCsm1 that differs from a wild-type ObCsm1 sequence (SEQ ID NO:137) in containing at least one point mutation selected from the group consisting of K382N, Q393K, S925A, E933N, K943F/Q, K972L, K1064G, P670I, N671I, D727A, E939A, and D1053A.

[0114] In embodiments of any one of the first, second, third, fourth, fifth, and sixth engineered systems, the at least one Cas12a tracrRNA has a nucleotide sequence selected from the group consisting of SEQ ID NOs:1, 3, 6, 139-146, 149-169, 223-240, and 241. In embodiments of any one of the first, second, third, fourth, fifth, and sixth engineered systems, the genomic sequence encoding the Cas12a nuclease and the genomic sequence encoding the Cas12a tracrRNA occur naturally within the same region in a genome; in embodiments, the genomic sequence encoding the Cas12a tracrRNA is located preferably within about 0.2, 0.3, 0.4, 0.5, 0.6, 0.7, 0.8, 0.9, 1.0, 1.1, 1.2, 1.3, 1.4, 1.5, 1.6, 1.7, 1.8, 1.9, or 2.0 kilobases of the DNA segment(s) encoding the Cas12a nuclease. In embodiments of any one of the first, second, third, fourth, fifth, and sixth engineered systems, the target sequence is located 3′ of a Protospacer Adjacent Motif (PAM) and the PAM sequence is TTN, where N is A/C/G or T and the Cas12a nuclease is FnCpf1, or the PAM sequence is TTTV, where V is A/C or G and the Cas12a nuclease is PaCpf1p, LbCpf1 or AsCpf1.

[0115] In embodiments of any one of the first, second, fourth, fifth, and sixth engineered systems, the Cas12a tracrRNA is a putative Cas12a tracrRNA that is identified from the same genomic region as the Cas12a nuclease by at least the following steps: (a) identifying in the genomic region flanking the DNA encoding the Cas12a nuclease at least one nucleotide sequence that includes a CRISPR array including direct repeats; (b) identifying as a putative Cas12a tracrRNA at least one nucleotide sequence in either the sense or antisense direction in the genomic region flanking the DNA encoding the Cas12a nuclease, wherein the putative Cas12a tracrRNA has a nucleotide sequence that has at least 50% complementarity with, the nucleotide sequence of the direct repeat. In embodiments, the genomic sequence encoding the Cas12a tracrRNA is located preferably within about 0.2, 0.3, 0.4, 0.5, 0.6, 0.7, 0.8, 0.9, 1.0, 1.1, 1.2, 1.3, 1.4, 1.5, 1.6, 1.7, 1.8, 1.9, or 2.0 kilobases of the DNA segment(s) encoding the Cas12a nuclease. In embodiments, the Cas12a tracrRNA locus is directly adjacent to the DNA encoding the Cas12a nuclease. In embodiments, there is additional genomic sequence, such as DNA sequence encoding other Cas nucleases, located between the Cas12a tracrRNA locus and the DNA encoding the Cas12a nuclease; see, e.g., FIGS. 1 and 4.

[0116] In embodiments of any one of the first, second, fourth, fifth, and sixth engineered systems, the Cas12a tracrRNA is provided: (a) as DNA encoding a first RNA molecule including the Cas12a tracrRNA and including a restriction endonuclease cleavage site that is suitable for insertion of a sequence coding for a functional RNA moiety; or (b) as a functional RNA molecule including the Cas12a tracrRNA and a functional RNA moiety, or as a polynucleotide encoding the functional RNA molecule; or (c) by a DNA expression system including: (i) DNA sequence for a first promoter; and (ii) operably linked and heterologous to the first promoter, a DNA sequence encoding a first RNA molecule including a Cas12a tracrRNA and including a restriction endonuclease cleavage site that is suitable for insertion of a sequence coding for a functional RNA moiety; or (d) by a DNA expression system including: (a) DNA sequence for a first promoter; and (b) operably linked and heterologous to the first promoter, a DNA sequence encoding a functional RNA molecule including a Cas12a tracrRNA and a functional RNA moiety. In embodiments, the DNA expression system includes (a) DNA sequence for a first promoter; and (b) operably linked and heterologous to the first promoter, a DNA sequence encoding a functional RNA molecule including a Cas12a tracrRNA and a functional RNA moiety, and (c) a terminator 3′ to and operably linked to the DNA encoding a functional RNA molecule.

[0117] In embodiments of any one of the first, second, third, fourth, fifth, and sixth engineered systems, the Cas12a tracrRNA is provided as DNA encoding a first RNA molecule including the Cas12a tracrRNA and including a restriction endonuclease cleavage site that is suitable for insertion of a sequence coding for a functional RNA moiety, and wherein the functional RNA moiety is at least one selected from the group consisting of: (a) a nucleotide sequence for annealing to a donor polynucleotide; (b) a nucleotide sequence for annealing to the crRNA 3′ extension; (c) a terminator sequence; (d) an RNA aptamer; (e) an enzymatically active RNA sequence; (f) a detectable label; and (g) an RNA sequence forming at least partially double-stranded RNA. In embodiments of any one of the first, second, fourth, fifth, and sixth engineered systems, the Cas12a tracrRNA is provided as DNA encoding a first RNA molecule including the Cas12a tracrRNA and including a restriction endonuclease cleavage site that is suitable for insertion of a sequence coding for a functional RNA moiety, wherein the functional RNA moiety includes RNA forming at least partially double-stranded RNA capable of silencing a gene (e.g., RNA that forms one or more stem-loops where the stem includes double-stranded RNA of at least about 18 base-pairs designed to silence a target gene, or RNA that has the secondary structure of a microRNA precursor and is processed to a mature microRNA designed to silence a target gene). In embodiments of any one of the first, second, fourth, fifth, and sixth engineered systems, the Cas12a tracrRNA is provided as DNA encoding a first RNA molecule including the Cas12a tracrRNA and including a restriction endonuclease cleavage site that is suitable for insertion of a sequence coding for a functional RNA moiety, wherein the functional RNA moiety includes an RNA sequence for annealing to a donor polynucleotide, and wherein the composition further includes the donor polynucleotide.

[0118] In embodiments of any one of the first, second, third fourth, fifth, and sixth engineered systems, the Cas12a tracrRNA is provided as a functional RNA molecule including the Cas12a tracrRNA and a functional RNA moiety, or as a polynucleotide encoding the functional RNA molecule, and wherein the functional RNA moiety is at least one selected from the group consisting of: (a) a nucleotide sequence for annealing to a donor polynucleotide; (b) a nucleotide sequence for annealing to the crRNA 3′ extension; (c) a terminator sequence; (d) an RNA aptamer; (e) an enzymatically active RNA sequence; (f) a detectable label; and (g) an RNA sequence forming at least partially double-stranded RNA. In embodiments of any one of the first, second, third, fourth, fifth, and sixth engineered systems, the Cas12a tracrRNA is provided as a functional RNA molecule including the Cas12a tracrRNA and a functional RNA moiety, or as a polynucleotide encoding the functional RNA molecule, and wherein the functional RNA moiety includes RNA forming at least partially double-stranded RNA capable of silencing a gene (e.g., RNA that forms one or more stem-loops where the stem includes double-stranded RNA of at least about 18 base-pairs designed to silence a target gene, or RNA that has the secondary structure of a microRNA precursor and is processed to a mature microRNA designed to silence a target gene). In embodiments of any one of the first, second, third, fourth, fifth, and sixth engineered systems, the Cas12a tracrRNA is provided as a functional RNA molecule including the Cas12a tracrRNA and a functional RNA moiety, or as a polynucleotide encoding the functional RNA molecule, and wherein the functional RNA moiety includes RNA forming at least partially double-stranded RNA capable of silencing a gene that is involved in one or more small RNA-mediated silencing pathways, e.g., RDR6, SDE3, RDR2, WEX, SGS3, DCL2-4, UPF1, UPF3, HEN1, NRPD1A, NRPD2, DRD1, HDA6, AGO1, and MOP1.

[0119] In embodiments of any one of the first, second, third, fourth, fifth, and sixth engineered systems, the Cas12a tracrRNA is provided as a functional RNA molecule including the Cas12a tracrRNA and a functional RNA moiety, or as a polynucleotide encoding the functional RNA molecule, wherein the functional RNA moiety includes an RNA sequence for annealing to a donor polynucleotide, and wherein the system further includes the donor polynucleotide. In embodiments, the donor polynucleotide is single-stranded DNA, or is blunt-ended double-stranded DNA, or is double-stranded DNA with an overhang at least at one terminus, or is an at least partially double-stranded DNA/RNA hybrid. In embodiments of any one of the first, second, third, fourth, fifth, and sixth engineered systems, the Cas12a tracrRNA is provided in a molar excess, relative to the amount of Cas12a nuclease. In embodiments of any one of the first, second, third, fourth, fifth, and sixth engineered systems, the Cas12a tracrRNA is provided in a molar amount that is at least 10-fold greater than the molar amount of the Cas12a nuclease.

[0120] A related aspect of the invention includes a delivery particle including the engineered system any one of the first, second, third, fourth, fifth, and sixth engineered systems. In embodiments of the delivery particle, the Cas12a nuclease is complexed with the engineered Cas12a crRNA polynucleotide, e.g., to form a Cas12a ribonucleoprotein. In embodiments of the delivery particle, the Cas12a tracrRNA is present in a molar excess, relative to the amount of Cas12a nuclease (or Cas12a ribonucleoprotein). In embodiments of the delivery particle, the Cas12a tracrRNA is present in a molar amount that is at least 10-fold greater than the molar amount of the Cas12a nuclease (or Cas12a ribonucleoprotein). In embodiments of the delivery particle, the Cas12a nuclease is first complexed with the engineered Cas12a crRNA polynucleotide, e.g., to form a Cas12a ribonucleoprotein, followed by provision, without an annealing step, of the Cas12a tracrRNA in a molar amount that is at least 10-fold greater than the molar amount of the Cas12a nuclease (or Cas12a ribonucleoprotein).

[0121] A related aspect of the invention includes a delivery liquid including the engineered system any one of the first, second, third, fourth, fifth, and sixth engineered systems. In embodiments of the delivery liquid, the Cas12a nuclease is complexed with the engineered Cas12a crRNA polynucleotide, e.g., to form a Cas12a ribonucleoprotein. In embodiments of the delivery liquid, the Cas12a tracrRNA is present in a molar excess, relative to the amount of Cas12a nuclease (or Cas12a ribonucleoprotein). In embodiments of the delivery liquid, wherein the Cas12a tracrRNA is present in a molar amount that is at least 10-fold greater than the molar amount of the Cas12a nuclease (or Cas12a ribonucleoprotein). In embodiments of the delivery liquid, the Cas12a nuclease is first complexed with the engineered Cas12a crRNA polynucleotide, e.g., to form a Cas12a ribonucleoprotein, followed by provision, without an annealing step, of the Cas12a tracrRNA in a molar amount that is at least 10-fold greater than the molar amount of the Cas12a nuclease (or Cas12a ribonucleoprotein).

[0122] Yet another aspect of the invention includes a method of modifying or editing a target sequence in a locus of interest of a eukaryotic cell including delivering the engineered system according to any one of the first, second, third, fourth, fifth, and sixth engineered systems to the locus of interest, wherein the spacer sequence hybridizes with the target sequence, whereby modification or editing of the locus of interest occurs. Target sequences and eukaryotic cells are described in detail below under the section headed “Related Disclosure”. The locus of interest is any specific locus in a DNA molecule, chromosome, or genome obtained from or located within a eukaryotic cell, a eukaryotic tissue, or a eukaryotic organism; in embodiments, the DNA molecule, chromosome, or genome is in vitro, ex vivo, or in vivo. In embodiments of the method, the eukaryotic cell includes a cell of a cell line or a cell of a multicellular organism, and the locus of interest includes a locus of interest in the genome of the eukaryotic cell. In embodiments of the method, the locus of interest is DNA encoding a gene of interest, and can include coding sequence, non-coding sequence, or both coding and non-coding sequence, and can include an intact functional gene (e.g., including untranscribed regions located 3′ or 5′ to DNA regions encoding a polypeptide, introns, and regulatory elements such as promoters, enhancers, polyadenylation signals, and terminators). In embodiments of the method, the target sequence is a segment of the locus of interest; in embodiments, the target sequence includes about 20 to about 30 contiguous nucleotides and has near perfect or perfect sequence complementarity to the nucleotide sequence of the spacer of the Cas12a crRNA. In embodiments of the method, the eukaryotic cell is a non-human animal cell, a human cell, a plant cell, or a fungal cell. In embodiments of the method, the eukaryotic cell is in vitro, ex vivo, or in vivo. In embodiments of the method, the locus of interest is within a eukaryotic cell, a eukaryotic tissue, or a eukaryotic organism; in embodiments, the locus of interest is within the genome of a non-human animal, a human, a plant, or a fungus, or within the genome of a eukaryotic organelle such as a mitochondrion or a plastid (e.g., a chloroplast). In embodiments of the method, the eukaryotic cell includes a non-human animal or human stem cell or a non-human animal or human stem cell line. In embodiments of the method, the locus of interest is within a eukaryotic DNA molecule in vitro or in a recombinant DNA molecule or recombinant vector.

[0123] In embodiments of the method, the eukaryotic cell includes a plant cell, and the modification of the locus of interest is correlated with a modified trait in a plant including cells containing the modification of the locus of interest. In embodiments of the method, the eukaryotic cell includes a plant cell, the modification of the locus of interest is correlated with a modified trait in a plant including cells containing the modification of the locus of interest, and the method further includes obtaining, growing, or regenerating a plant from the plant cell, wherein the plant includes cells containing the modification of the locus of interest, and wherein the plant exhibits the modified trait effected by the modification of the locus of interest. In embodiments of the method, the eukaryotic cell includes a plant cell, and the method further includes identifying a trait of interest in a plant obtained, grown, or regenerated from the plant cell, wherein the trait of interest is effected by the modification of the locus of interest. In embodiments of the method, the eukaryotic cell includes a plant cell, the method further includes identifying a trait of interest in a plant obtained, grown, or regenerated from the plant cell, wherein the trait of interest is effected by the modification of the locus of interest, and the method further includes (a) introducing a nucleotide sequence including the locus of interest into a plant cell, a plant cell line, or a plant germplasm, and generating from the plant cell, the plant cell line, or the plant germplasm a plant including cells containing the nucleotide sequence including the locus of interest; or (b) introducing the modified locus of interest into a plant cell, a plant cell line, or a plant germplasm, and generating from the plant cell, the plant cell line, or the plant germplasm a plant including cells containing the modified locus of interest; or (c) modifying expression of the locus of interest in a plant cell, a plant cell line, or a plant germplasm, and generating from the plant cell, the plant cell line, or the plant germplasm a plant including cells containing the locus of interest having modified expression; or (d) deleting the locus of interest or an endogenous nucleotide sequence including the locus of interest in a plant cell, and generating from the plant cell, the plant cell line, or the plant germplasm a plant including cells in which the locus of interest or the endogenous nucleotide sequence including the locus of interest has been deleted.

[0124] In embodiments of the method, the eukaryotic cell includes a non-human animal cell (e.g. a somatic cell or gamete of a non-human animal, in vivo, in vitro, or ex vivo), and the modification of the locus of interest is correlated with a modified trait or characteristic in a non-human animal including cells containing the modification of the locus of interest. In embodiments of the method, the eukaryotic cell includes a non-human animal cell, the modification of the locus of interest is correlated with a modified trait or characteristic in a non-human animal or in a non-human animal cell line including cells containing the modification of the locus of interest, and the method further includes obtaining, growing, regenerating, or breeding a non-human animal or a non-human animal cell line from the non-human animal cell, wherein the non-human animal or a non-human animal cell line includes cells containing the modification of the locus of interest, and wherein the non-human animal or a non-human animal cell line exhibits the modified trait or characteristic effected by the modification of the locus of interest. In embodiments of the method, the eukaryotic cell includes a non-human animal cell, and the method further includes identifying a trait or characteristic of interest in a non-human animal or a non-human animal cell line obtained, grown, regenerated, or bred from the non-human animal cell, wherein the trait or characteristic of interest is effected by the modification of the locus of interest. In embodiments of the method, the eukaryotic cell includes a non-human animal cell, the method further includes identifying a trait or characteristic of interest in a non-human animal or a non-human animal cell line obtained, grown, regenerated, or bred from the non-human animal cell, wherein the trait or characteristic of interest is effected by the modification of the locus of interest, and the method further includes (a) introducing a nucleotide sequence including the locus of interest into a non-human animal cell, a non-human animal cell line, or a non-human animal, and obtaining, growing, regenerating, or breeding from the non-human animal cell, the non-human animal cell line, or the non-human animal a non-human animal or a non-human animal cell line including cells containing the nucleotide sequence including the locus of interest; or (b) introducing the modified locus of interest into a non-human animal cell, a non-human animal cell line, or a non-human animal, and obtaining, growing, regenerating, or breeding from the non-human animal cell, the non-human animal cell line, or the non-human animal a non-human animal or a non-human animal cell line including cells containing the modified locus of interest; or (c) modifying expression of the locus of interest in a non-human animal cell, a non-human animal cell line, or a non-human animal, and obtaining, growing, regenerating, or breeding from the non-human animal cell, the non-human animal cell line, or the non-human animal a non-human animal or a non-human animal cell line including cells containing the locus of interest having modified expression; or (d) deleting the locus of interest or an endogenous nucleotide sequence including the locus of interest in a non-human animal cell, a non-human animal cell line, or a non-human animal, and obtaining, growing, regenerating, or breeding from the non-human animal cell, the non-human animal cell line, or the non-human animal a non-human animal or a non-human animal cell line including cells in which the locus of interest or the endogenous nucleotide sequence including the locus of interest has been deleted.

[0125] In embodiments of the method, the engineered system or a component thereof is delivered via delivery particles, delivery vesicles, delivery liquids, or one or more viral or bacterial vectors. In embodiments of the method, the engineered system or a component thereof is delivered via delivery particles such as delivery nanoparticles or delivery microparticles including at least one material or reagent selected from the group consisting of a lipid, a sugar, a metal, or a protein. In embodiments of the method, the system or a component thereof is delivered via delivery exosomes or liposomes. In embodiments of the method, the engineered system or a component thereof is delivered via at least one viral vector selected from the group consisting of adenoviruses, lentiviruses, adeno-associated viruses, retroviruses, geminiviruses, begomoviruses, tobamoviruses, potex viruses, comoviruses, wheat streak mosaic virus, barley stripe mosaic virus, bean yellow dwarf virus, bean pod mottle virus, cabbage leaf curl virus, beet curly top virus, tobacco yellow dwarf virus, tobacco rattle virus, potato virus X, and cowpea mosaic virus. In embodiments of the method, the engineered system or a component thereof is delivered via at least one bacterial vector capable of transforming a plant cell and selected from the group consisting of Agrobacterium sp., Rhizobium sp., Sinorhizobium (Ensifer) sp., Mesorhizobium sp., Bradyrhizobium sp., Azobacter sp., and Phyllobacterium sp. Additional information on delivery particles, delivery vesicles, delivery liquids, viral or bacterial vectors, and reagents and methods for their use is found in the section below headed “Delivery Methods and Delivery Agents”.

[0126] In embodiments of the method, the Cas12a nuclease is: (a) a Cas12a nuclease identified from the genome of a bacterial species selected from the group consisting of Francisella tularensis 1, Prevotella albensis, Lachnospiraceae bacterium MC2017 1, Butyrivibrio proteoclasticus, Peregrinibacteria bacterium GW2011_GWA2_33_10, Parcubacteria bacterium GW2011_GWC2_44_17, Smithella sp. SCADC, Acidaminococcus sp. BV3L6, Lachnospiraceae bacterium MA2020, Candidatus Methanoplasma termitum, Eubacterium eligens, Moraxella bovoculi 237, Leptospira inadai, Lachnospiraceae bacterium ND2006, Porphyromonas crevioricanis 3, Prevotella disiens and Porphyromonas macacae; or (b) a Cas12a nuclease selected from the group consisting of LbCas12a, AsCas12a, FnCas12a, and a deactivated Cas12a nuclease; or (c) a Cas12a nuclease having at least 80% sequence identity with a sequence selected from the group consisting of SEQ ID NOs:11, 107-138, 172, 204-221, and 222; or (d) a Cas12a nuclease variant selected from the group consisting of (1) a variant LbCpf1 that differs from a wild-type LbCpf1 sequence (SEQ ID NO:135) in containing at least one point mutation selected from the group consisting of G309P, Y312F, M4741, D523N, Q531K, C930A, D937N, V954F/Q, M975L, A984E, I994L, T1006K, I1014V, V1055N/D, L1065F/Y, Y1180F, V1209G, I1229L, V801I, Y802I, D850A, E943A, and D1198A; (2) a variant AsCpf1 that differs from a wild-type AsCpf1 sequence (SEQ ID NO:134) in containing at least one point mutation selected from the group consisting of L320P, V980A, Q987N, T1004F/Q, K1035E, T1057K, D1107N, F1117Y, N1291L, D908A, E993A, and D1263A; and (3) a variant FnCpf1 that differs from a wild-type FnCpf1 sequence (SEQ ID NO:172) in containing at least one point mutation selected from the group consisting of I339P, L342F, Q588K, F1017Q, K1047E, N1118D, F1128Y, L867I, D917A, E1006A, and D1255A. In embodiments, the Cas12a nuclease is deactivated. In embodiments, the Cas12a nuclease includes at least one modification selected from the group consisting of: (a) a localization signal (e.g., a nuclear localization signal, a mitochondrial localization signal, or a plastid localization signal); (b) a detectable label (e.g., a fluorescent dye); (c) a cell-penetrating peptide; (d) an endosomal escape peptide; and (e) an affinity tag.

[0127] In embodiments of the method, the Cas12a tracrRNA has a nucleotide sequence including a sequence selected from the group consisting of SEQ ID NOs:1, 3, 6, 139-146, 149-169, 223-240, and 241. In embodiments of the method, the tracrRNA is a putative Cas12a tracrRNA that is identified from the same genomic region as the Cas12a nuclease by at least the following steps: (a) identifying in the genomic region flanking the DNA encoding the Cas12a nuclease at least one nucleotide sequence that includes a CRISPR array including direct repeats; (b) identifying as a putative Cas12a tracrRNA at least one nucleotide sequence in either the sense or antisense direction in the genomic region flanking the DNA encoding the Cas12a nuclease, wherein the putative Cas12a tracrRNA has a nucleotide sequence that has at least 50% complementarity with, the nucleotide sequence of the direct repeat. In embodiments of the method, the Cas12a tracrRNA locus is directly adjacent to the DNA encoding the Cas12a nuclease. In embodiments of the method, there is additional genomic sequence, such as DNA sequence encoding other Cas nucleases, located between the Cas12a tracrRNA locus and the DNA encoding the Cas12a nuclease; see, e.g., FIGS. 1 and 4.

Methods of Editing a Genetic Locus with a Cas12a Nuclease with Increased Efficiency

[0128] A further aspect of the invention includes a method of editing a genetic locus with a Cas12a nuclease, including contacting DNA that includes the genetic locus with: (a) a Cas12a nuclease; and (b) an engineered Cas12a crRNA that includes a spacer sequence that is designed to hybridize with a target sequence in the genetic locus; and (c) a Cas12a tracrRNA, thereby editing the genetic locus; wherein the efficiency of editing of the genetic locus is increased compared to a control method in which the DNA that includes the genetic locus is contacted with the Cas12a nuclease and the Cas12a crRNA, but not the Cas12a tracrRNA. The method enables editing a genetic locus or target sequence with a Cas12a nuclease with increased efficiency, in comparison to methods previously reported that employ a Cas12a nuclease and a Cas12a crRNA (or “guide RNA”) but do not include a Cas12a tracrRNA. Efficiency of editing is increased, e.g., when the percentage of cells containing the expected edit at the genetic locus is increased compared to that seen in a control, or when a given level of editing is obtained using a lower amount of Cas12a nuclease, compared to a control. A related aspect is a method of increasing the efficiency of editing a genetic locus by a Cas12a ribonucleoprotein that includes a Cas12a nuclease and a Cas12a crRNA, by providing together with the Cas12a ribonucleoprotein a Cas12a tracrRNA that is capable of hybridizing to the Cas12a crRNA (e.g., a Cas12a tracrRNA of between about 60 to about 100 nucleotides in length that has at least 50% complementarity to the sequence of the Cas12a crRNA), whereby the efficiency of the editing of the genetic locus is increased, compared to that obtained in a control method where the Cas12a ribonucleoprotein is provided without the Cas12a tracrRNA; in embodiments of the method, the Cas12a tracrRNA is provided in molar excess of the Cas12a ribonucleoprotein.

[0129] In embodiments of the methods, the Cas12a nuclease and the engineered Cas12a crRNA are provided as a ribonucleoprotein complex. In embodiments, the Cas12a nuclease is provided as a polynucleotide encoding the Cas12a nuclease. In embodiments, the Cas12a nuclease is: (a) a Cas12a nuclease identified from the genome of a bacterial species selected from the group consisting of Francisella tularensis 1, Prevotella albensis, Lachnospiraceae bacterium MC2017 1, Butyrivibrio proteoclasticus, Peregrinibacteria bacterium GW2011GWA2_33_10, Parcubacteria bacterium GW2011_GWC2_44_17, Smithella sp. SCADC, Acidaminococcus sp. BV3L6, Lachnospiraceae bacterium MA2020, Candidatus Methanoplasma termitum, Eubacterium eligens, Moraxella bovoculi 237, Leptospira inadai, Lachnospiraceae bacterium ND2006, Porphyromonas crevioricanis 3, Prevotella disiens and Porphyromonas macacae; or (b) a Cas12a nuclease selected from the group consisting of LbCas12a, AsCas12a, FnCas12a, and a deactivated Cas12a nuclease; or (c) a Cas12a nuclease having at least 80% sequence identity with a sequence selected from the group consisting of SEQ ID NOs:11, 107-138, 172, 204-221, and 222; or (d) a Cas12a nuclease variant selected from the group consisting of (1) a variant LbCpf1 that differs from a wild-type LbCpf1 sequence (SEQ ID NO:135) in containing at least one point mutation selected from the group consisting of G309P, Y312F, M4741, D523N, Q531K, C930A, D937N, V954F/Q, M975L, A984E, I994L, T1006K, I1014V, V1055N/D, L1065F/Y, Y1180F, V1209G, I1229L, V801I, Y802I, D850A, E943A, and D1198A; (2) a variant AsCpf1 that differs from a wild-type AsCpf1 sequence (SEQ ID NO:134) in containing at least one point mutation selected from the group consisting of L320P, V980A, Q987N, T1004F/Q, K1035E, T1057K, D1107N, F1117Y, N1291L, D908A, E993A, and D1263A; and (3) a variant FnCpf1 that differs from a wild-type FnCpf1 sequence (SEQ ID NO:172) in containing at least one point mutation selected from the group consisting of I339P, L342F, Q588K, F1017Q, K1047E, N1118D, F1128Y, L867I, D917A, E1006A, and D1255A. In embodiments, the Cas12a nuclease is deactivated. In embodiments, the Cas12a nuclease includes at least one modification selected from the group consisting of: (a) a localization signal (e.g., a nuclear localization signal, a mitochondrial localization signal, or a plastid localization signal); (b) a detectable label (e.g., a fluorescent dye); (c) a cell-penetrating peptide; (d) an endosomal escape peptide; and (e) an affinity tag. The methods including use of a tracrRNA as disclosed herein can also be employed with related Cas nucleases, including Csm nucleases, e.g., ObCsm1 (GenBank accession number OGX23684), SmCsm1 (GenBank accession number KF067988), MiCsm1 (GenBank accession number KKQ38176), or SuCsm1 (GenBank accession number KIM12007) (see, e.g., Begemann et al. (2017) bioRxiv, publicly available at dx[dot]doi[dot]org/10[dot]1101/192799), nucleases having a sequence selected from the group consisting of SEQ ID NOs:115, 137, 138, and variants thereof, such as a variant ObCsm1 that differs from a wild-type ObCsm1 sequence (SEQ ID NO:137) in containing at least one point mutation selected from the group consisting of K382N, Q393K, S925A, E933N, K943F/Q, K972L, K1064G, P670I, N671I, D727A, E939A, and D1053A.

[0130] In embodiments of the methods, the Cas12a tracrRNA is provided: (a) as DNA encoding a first RNA molecule including the Cas12a tracrRNA and including a restriction endonuclease cleavage site that is suitable for insertion of a sequence coding for a functional RNA moiety; or (b) as a functional RNA molecule including the Cas12a tracrRNA and a functional RNA moiety, or as a polynucleotide encoding the functional RNA molecule; or (c) by a DNA expression system comprising (i) DNA sequence for a first promoter; and (ii) operably linked and heterologous to the first promoter, DNA encoding a first RNA molecule comprising a Cas12a tracrRNA and comprising a restriction endonuclease cleavage site that is suitable for insertion of a sequence coding for a functional RNA moiety; and (iii) optionally, a terminator 3′ to and operably linked to the DNA encoding the first RNA molecule; or (d) by a DNA expression system comprising: (i) DNA sequence for a first promoter; and (ii) operably linked and heterologous to the first promoter, a DNA encoding a functional RNA molecule comprising a Cas12a tracrRNA and a functional RNA moiety; and (iii) optionally, a terminator 3′ to and operably linked to the DNA encoding a functional RNA molecule. In embodiments of the methods, the Cas12a tracrRNA is provided as a synthetic Cas12a tracrRNA, e.g., a Cas12a tracrRNA synthesized in vitro from an expression construct including a heterologous promoter operably linked to DNA encoding the Cas12a tracrRNA and optionally including an operably linked terminator. In embodiments of the methods, the Cas12a tracrRNA is provided as a Cas12a tracrRNA obtained from a naturally occurring source, e.g., isolated from a Cas12a tracrRNA that naturally occurs in genomic DNA, or amplified from a Cas12a tracrRNA that naturally occurs in genomic DNA.

[0131] In embodiments of the methods, the Cas12a tracrRNA is a putative tracrRNA. In embodiments, the putative Cas12a tracrRNA is identified from the same genomic region as the Cas12a nuclease by at least the following steps: (a) identifying in the genomic region flanking the DNA encoding the Cas12a nuclease at least one nucleotide sequence that includes a CRISPR array including direct repeats; (b) identifying as a putative Cas12a tracrRNA at least one nucleotide sequence in either the sense or antisense direction in the genomic region flanking the DNA encoding the Cas12a nuclease, wherein the putative Cas12a tracrRNA has a nucleotide sequence that has at least 50% complementarity with, the nucleotide sequence of the direct repeat. In embodiments, the Cas12a tracrRNA locus is directly adjacent to the DNA encoding the Cas12a nuclease. In embodiments, there is additional genomic sequence, such as DNA sequence encoding other Cas nucleases, located between the Cas12a tracrRNA locus and the DNA encoding the Cas12a nuclease; see, e.g., FIGS. 1 and 4.

[0132] In embodiments of the methods, the Cas12a tracrRNA is provided in a molar excess, relative to the Cas12a nuclease. In embodiments, the Cas12a tracrRNA is provided in a molar amount that is at least 10-fold (e.g., at least 10-fold, 15-fold, 20-fold, 30-fold, 50-fold, 90-fold, 100-fold, 150-fold, or 200-fold) greater than the molar amount of the Cas12a nuclease. In embodiments, the Cas12a tracrRNA is added in a molar excess (relative to the Cas12a nuclease) to a composition containing the Cas12a ribonucleoprotein including the Cas12a nuclease and the Cas12a crRNA. In embodiments, the Cas12a tracrRNA has a nucleotide sequence comprising a sequence selected from the group consisting of SEQ ID NOs:1, 3, 6, 139-146, 149-169, 223-240, and 241.

[0133] In embodiments of the methods, the engineered Cas12a crRNA includes a spacer sequence that is designed to hybridize with a target sequence in the genetic locus. In embodiments, the target sequence is a segment of a genetic locus or a gene of interest. In embodiments, the target sequence includes about 20 to about 30 contiguous nucleotides and has near perfect or perfect sequence complementarity to the nucleotide sequence of the spacer of the Cas12a crRNA. In embodiments, the engineered Cas12a crRNA, or a polynucleotide encoding the engineered Cas12a crRNA, further includes at least one direct repeat sequence or fragment thereof capable of associating with the Cas12a nuclease, wherein the at least one direct repeat sequence or fragment thereof is adjacent to and 3′ to the spacer sequence. In embodiments, the engineered Cas12a crRNA further includes a 3′ extension adjacent to the spacer sequence. In embodiments, the 3′ extension includes nucleotides that when base-paired form about one helical turn. In embodiments, the 3′ extension includes at least 10 contiguous nucleotides. In embodiments, the Cas12a tracrRNA has a nucleotide sequence having sufficient complementarity to the engineered Cas12a crRNA's 3′ extension to allow hybridization between the tracrRNA and the engineered Cas12a crRNA.

[0134] In embodiments of the methods, the editing of the genetic locus is effecting an indel in the genetic locus. In embodiments, the editing of the genetic locus is effecting non-homologous end joining (NHEJ) in the genetic locus. In embodiments, the editing of the genetic locus is effecting homology-dependent repair (HDR) in the genetic locus; in such embodiments, the method can further comprise providing a donor polynucleotide encoding a sequence to be integrated at a double-stranded break that is effected by the method in the genetic locus; examples of suitable donor polynucleotides are described above under the heading “A Method of Integrating a Sequence Encoded by a Donor Polynucleotide at a Specific Locus”.

[0135] In embodiments of the methods, the DNA that includes the genetic locus is genomic DNA. In embodiments, the genetic locus is genomic DNA of a eukaryotic nucleus, or mitochondrial DNA, or plastid DNA. In embodiments, the DNA that includes the genetic locus is in a eukaryotic DNA molecule in vitro. In embodiments, the DNA that includes the genetic locus is in a eukaryotic cell; in embodiments, the eukaryotic cell is an isolated eukaryotic cell, or a eukaryotic cell in culture, or a eukaryotic cell located in a tissue or organ of a eukaryotic organism. In embodiments, the eukaryotic cell is a cell of a non-human animal, an invertebrate, a vertebrate, a mollusk, an arthropod, an insect, a fish, a reptile, an amphibian, a bird, a mammal, a primate, a non-human primate, a human, a plant, or a fungus. In embodiments, the eukaryotic cell includes a cell of a cell line or a cell of a multicellular organism, and wherein the genetic locus to be modified includes a locus of interest in the genome of the eukaryotic cell. In embodiments, the eukaryotic cell is in vitro, ex vivo, or in vivo. In embodiments, the eukaryotic cell includes a non-human animal or human stem cell or a non-human animal or human stem cell line. Target sequences and eukaryotic cells are described in detail below under the section headed “Related Disclosure”.

### Compositions for Modifying a Genetic Locus

[0136] Yet another aspect of the invention provides a composition for modifying a genetic locus in a eukaryotic cell, including: (a) a eukaryotic cell containing a genetic locus to be modified; and (b) a Cas12a nuclease, or a polynucleotide encoding the Cas12a nuclease; and (c) an engineered Cas12a crRNA that includes a spacer sequence that is designed to hybridize with a target sequence in the genetic locus, or a polynucleotide encoding the Cas12a crRNA; and (d) a Cas12a tracrRNA, or a polynucleotide encoding the Cas12a tracrRNA, wherein the Cas12a tracrRNA is provided in molar excess relative to the Cas12a nuclease. In embodiments wherein the genetic locus is to be modified by homology-dependent repair, the composition further includes: (e) a donor polynucleotide encoding a sequence to be integrated at a double-stranded break in the genetic locus; examples of suitable donor polynucleotides are described above under the heading “A Method of Integrating a Sequence Encoded by a Donor Polynucleotide at a Specific Locus”.

[0137] In embodiments of the composition, the Cas12a tracrRNA is identified from the same genomic region as the Cas12a nuclease by at least the following steps: (a) identifying in the genomic region flanking the DNA encoding the Cas12a nuclease at least one nucleotide sequence that includes a CRISPR array including direct repeats; (b) identifying as a putative Cas12a tracrRNA at least one nucleotide sequence in either the sense or antisense direction in the genomic region flanking the DNA encoding the Cas12a nuclease, wherein the putative Cas12a tracrRNA has a nucleotide sequence that has at least 50% complementarity with, the nucleotide sequence of the direct repeat. In embodiments, the Cas12a tracrRNA locus is directly adjacent to the DNA encoding the Cas12a nuclease. In embodiments, there is additional genomic sequence, such as DNA sequence encoding other Cas nucleases, located between the Cas12a tracrRNA locus and the DNA encoding the Cas12a nuclease; see, e.g., FIGS. 1 and 4.

[0138] In embodiments of the composition, the Cas12a tracrRNA is present in a molar excess, relative to the Cas12a nuclease. In embodiments, the Cas12a tracrRNA is present in a molar amount that is at least 10-fold (e.g., at least 10-fold, 15-fold, 20-fold, 30-fold, 50-fold, 90-fold, 100-fold, 150-fold, or 200-fold) greater than the molar amount of the Cas12a nuclease.

[0139] In embodiments of the composition, the eukaryotic cell is a cell of a non-human animal, an invertebrate, a vertebrate, a mollusk, an arthropod, an insect, a fish, a reptile, an amphibian, a bird, a mammal, a primate, a non-human primate, a human, a plant, or a fungus. In embodiments, the eukaryotic cell includes a cell of a cell line or a cell of a multicellular organism, and wherein the genetic locus to be modified includes a locus of interest in the genome of the eukaryotic cell. In embodiments, the eukaryotic cell is in vitro, ex vivo, or in vivo. In embodiments, the eukaryotic cell includes a non-human animal or human stem cell or a non-human animal or human stem cell line.

[0140] In embodiments of the composition, the Cas12a nuclease and the engineered Cas12a crRNA are provided as a ribonucleoprotein complex. In embodiments, the Cas12a nuclease is provided as a polynucleotide encoding the Cas12a nuclease. In embodiments, the Cas12a nuclease is: (a) a Cas12a nuclease identified from the genome of a bacterial species selected from the group consisting of Francisella tularensis 1, Prevotella albensis, Lachnospiraceae bacterium MC2017 1, Butyrivibrio proteoclasticus, Peregrinibacteria bacterium GW2011GWA2_33_10, Parcubacteria bacterium GW2011_GWC2_44_17, Smithella sp. SCADC, Acidaminococcus sp. BV3L6, Lachnospiraceae bacterium MA2020, Candidatus Methanoplasma termitum, Eubacterium eligens, Moraxella bovoculi 237, Leptospira inadai, Lachnospiraceae bacterium ND2006, Porphyromonas crevioricanis 3, Prevotella disiens and Porphyromonas macacae; or (b) a Cas12a nuclease selected from the group consisting of LbCas12a, AsCas12a, FnCas12a, and a deactivated Cas12a nuclease; or (c) a Cas12a nuclease having at least 80% sequence identity with a sequence selected from the group consisting of SEQ ID NOs:11, 107-138, 172, 204-221, and 222; or (d) a Cas12a nuclease variant selected from the group consisting of (1) a variant LbCpf1 that differs from a wild-type LbCpf1 sequence (SEQ ID NO:135) in containing at least one point mutation selected from the group consisting of G309P, Y312F, M4741, D523N, Q531K, C930A, D937N, V954F/Q, M975L, A984E, I994L, T1006K, I1014V, V1055N/D, L1065F/Y, Y1180F, V1209G, I1229L, V801I, Y802I, D850A, E943A, and D1198A; (2) a variant AsCpf1 that differs from a wild-type AsCpf1 sequence (SEQ ID NO:134) in containing at least one point mutation selected from the group consisting of L320P, V980A, Q987N, T1004F/Q, K1035E, T1057K, D1107N, F1117Y, N1291L, D908A, E993A, and D1263A; and (3) a variant FnCpf1 that differs from a wild-type FnCpf1 sequence (SEQ ID NO:172) in containing at least one point mutation selected from the group consisting of I339P, L342F, Q588K, F1017Q, K1047E, N1118D, F1128Y, L867I, D917A, E1006A, and D1255A. In embodiments, the Cas12a nuclease is deactivated. In embodiments, the Cas12a nuclease includes at least one modification selected from the group consisting of: (a) a localization signal (e.g., a nuclear localization signal, a mitochondrial localization signal, or a plastid localization signal); (b) a detectable label (e.g., a fluorescent dye); (c) a cell-penetrating peptide; (d) an endosomal escape peptide; and (e) an affinity tag. The compositions including a tracrRNA as disclosed herein can also be employed with related Cas nucleases, including Csm nucleases, e.g., ObCsm1 (GenBank accession number OGX23684), SmCsm1 (GenBank accession number KF067988), MiCsm1 (GenBank accession number KKQ38176), or SuCsm1 (GenBank accession number KIM12007) (see, e.g., Begemann et al. (2017) bioRxiv, publicly available at dx[dot]doi[dot]org/10[dot]1101/192799), nucleases having a sequence selected from the group consisting of SEQ ID NOs:115, 137, 138, and variants thereof, such as a variant ObCsm1 that differs from a wild-type ObCsm1 sequence (SEQ ID NO:137) in containing at least one point mutation selected from the group consisting of K382N, Q393K, S925A, E933N, K943F/Q, K972L, K1064G, P670I, N671I, D727A, E939A, and D1053A.

[0141] In embodiments of the composition, the engineered Cas12a crRNA includes a spacer sequence that is designed to hybridize with a target sequence in the genetic locus. In embodiments, the target sequence is a segment of a genetic locus or a gene of interest; in embodiments, the target sequence includes about 20 to about 30 contiguous nucleotides and has near perfect or perfect sequence complementarity to the nucleotide sequence of the spacer of the Cas12a crRNA. In embodiments, the engineered Cas12a crRNA, or a polynucleotide encoding the engineered Cas12a crRNA, further includes at least one direct repeat sequence or fragment thereof capable of associating with the Cas12a nuclease, wherein the at least one direct repeat sequence or fragment thereof is adjacent to and 3′ to the spacer sequence. In embodiments, the engineered Cas12a crRNA further includes a 3′ extension adjacent to the spacer sequence. In embodiments, the 3′ extension includes nucleotides that when base-paired form about one helical turn. In embodiments, the 3′ extension includes at least 10 contiguous nucleotides. In embodiments, the Cas12a tracrRNA has a nucleotide sequence having sufficient complementarity to the engineered Cas12a crRNA's 3′ extension to allow hybridization between the tracrRNA and the engineered Cas12a crRNA.

[0142] In embodiments of the composition, the Cas12a tracrRNA is provided: (a) as DNA encoding a first RNA molecule including the Cas12a tracrRNA and including a restriction endonuclease cleavage site that is suitable for insertion of a sequence coding for a functional RNA moiety; or (b) as a functional RNA molecule including the Cas12a tracrRNA and a functional RNA moiety, or as a polynucleotide encoding the functional RNA molecule; or (c) by a DNA expression system comprising (i) DNA sequence for a first promoter; and (ii) operably linked and heterologous to the first promoter, DNA encoding a first RNA molecule comprising a Cas12a tracrRNA and comprising a restriction endonuclease cleavage site that is suitable for insertion of a sequence coding for a functional RNA moiety; and (iii) optionally, a terminator 3′ to and operably linked to the DNA encoding the first RNA molecule; or (d) by a DNA expression system comprising: (i) DNA sequence for a first promoter; and (ii) operably linked and heterologous to the first promoter, a DNA encoding a functional RNA molecule comprising a Cas12a tracrRNA and a functional RNA moiety; and (iii) optionally, a terminator 3′ to and operably linked to the DNA encoding a functional RNA molecule.

[0143] In embodiments of the composition, the Cas12a tracrRNA is provided as DNA encoding a first RNA molecule including the Cas12a tracrRNA and including a restriction endonuclease cleavage site that is suitable for insertion of a sequence coding for a functional RNA moiety, and wherein the functional RNA moiety is at least one selected from the group consisting of: (a) a nucleotide sequence for annealing to a donor polynucleotide; (b) a nucleotide sequence for annealing to the crRNA 3′ extension; (c) a terminator sequence; (d) an RNA aptamer; (e) an enzymatically active RNA sequence; (f) a detectable label; and (g) an RNA sequence forming at least partially double-stranded RNA. In embodiments of the composition, the Cas12a tracrRNA is provided as DNA encoding a first RNA molecule including the Cas12a tracrRNA and including a restriction endonuclease cleavage site that is suitable for insertion of a sequence coding for a functional RNA moiety, wherein the functional RNA moiety includes RNA forming at least partially double-stranded RNA capable of silencing a gene (e.g., RNA that forms one or more stem-loops where the stem includes double-stranded RNA of at least about 18 base-pairs designed to silence a target gene, or RNA that has the secondary structure of a microRNA precursor and is processed to a mature microRNA designed to silence a target gene). In embodiments of the composition, the Cas12a tracrRNA is provided as DNA encoding a first RNA molecule including the Cas12a tracrRNA and including a restriction endonuclease cleavage site that is suitable for insertion of a sequence coding for a functional RNA moiety, wherein the functional RNA moiety includes an RNA sequence for annealing to a donor polynucleotide, and wherein the composition further includes the donor polynucleotide. In embodiments of the composition, the Cas12a tracrRNA is provided as a functional RNA molecule including the Cas12a tracrRNA and a functional RNA moiety, or as a polynucleotide encoding the functional RNA molecule, and wherein the functional RNA moiety is at least one selected from the group consisting of: (a) a nucleotide sequence for annealing to a donor polynucleotide; (b) a nucleotide sequence for annealing to the crRNA 3′ extension; (c) a terminator sequence; (d) an RNA aptamer; (e) an enzymatically active RNA sequence; (f) a detectable label; and (g) an RNA sequence forming at least partially double-stranded RNA. In embodiments of the composition, the Cas12a tracrRNA is provided as a functional RNA molecule including the Cas12a tracrRNA and a functional RNA moiety, or as a polynucleotide encoding the functional RNA molecule, and wherein the functional RNA moiety includes RNA forming at least partially double-stranded RNA capable of silencing a gene (e.g., RNA that forms one or more stem-loops where the stem includes double-stranded RNA of at least about 18 base-pairs designed to silence a target gene, or RNA that has the secondary structure of a microRNA precursor and is processed to a mature microRNA designed to silence a target gene). In embodiments of the composition, the Cas12a tracrRNA is provided as a functional RNA molecule including the Cas12a tracrRNA and a functional RNA moiety, or as a polynucleotide encoding the functional RNA molecule, wherein the functional RNA moiety includes an RNA sequence for annealing to a donor polynucleotide, and wherein the composition further includes the donor polynucleotide.

[0144] In embodiments of the composition, the genetic locus in a eukaryotic cell to be modified is genomic DNA. In embodiments, the genetic locus is in genomic DNA of a eukaryotic nucleus, or mitochondrial DNA, or plastid DNA. In embodiments, the genetic locus is in a eukaryotic DNA molecule in vitro. In embodiments, the genetic locus is in a eukaryotic cell; in embodiments, the eukaryotic cell is an isolated eukaryotic cell, or a eukaryotic cell in culture, or a eukaryotic cell located in a tissue or organ of a eukaryotic organism. In embodiments, the eukaryotic cell is a cell of a non-human animal, an invertebrate, a vertebrate, a mollusk, an arthropod, an insect, a fish, a reptile, an amphibian, a bird, a mammal, a primate, a non-human primate, a human, a plant, or a fungus. In embodiments, the eukaryotic cell includes a cell of a cell line or a cell of a multicellular organism, and wherein the genetic locus to be modified includes a locus of interest in the genome of the eukaryotic cell. In embodiments, the eukaryotic cell is in vitro, ex vivo, or in vivo. In embodiments, the eukaryotic cell includes a non-human animal or human stem cell or a non-human animal or human stem cell line. Target sequences and eukaryotic cells are described in detail below under the section headed “Related Disclosure.”

[0145] In certain embodiments, the compositions disclosed herein further comprise one or more pharmaceutically acceptable excipients. Pharmaceutically acceptable excipients include those that serve as a vehicle or medium for the compositions described herein (e.g., any one of the inactive ingredients approved by the United States Food and Drug Administration (FDA) and listed in the Inactive Ingredient Database). Compositions of the present disclosure include compositions which are sterile and/or pyrogen-free. General considerations in the formulation and/or manufacture of pharmaceutical agents include those described in Remington: The Science and Practice of Pharmacy 21st ed., Lippincott Williams & Wilkins, 2005 (incorporated herein by reference). Non-limiting examples of pharmaceutically acceptable excipients include solvents, aqueous solvents, non-aqueous solvents, dispersion media, diluents, dispersions, suspension aids, surface active agents, isotonic agents, thickening agents, emulsifying agents, preservatives, polymers, peptides, proteins, cells, hyaluronidases, dispersing agents, granulating agents, disintegrating agents, binding agents, buffering agents (e.g., phosphate buffered saline (PBS)), lubricating agents, oils, and mixtures thereof. In certain embodiments, compositions disclosed herein for use in a treatments or manufacture of a medicament are suitable for administration to humans or any other animal (e.g., to non-human animals or non-human mammals). Subjects suitable for use of the compositions include humans and/or other primates; mammals, including commercially relevant mammals such as cattle, pigs, horses, sheep, cats, dogs, mice, and/or rats; and/or birds, including commercially relevant birds such as poultry, chickens, ducks, geese, and/or turkeys.

[0146] Also provided herein are methods of making compositions and methods of using such compositions to treat a genetic disease, cancer, a viral infection, a bacterial infection, a parasitic infection, a fungal infection, or a protozoan infection. In some embodiments, the genetic editing is of a genetic locus involved in a genetic condition or disease. In some embodiments, the disease or disorder is caused by a mutation in an enzyme. In some embodiments, the genetic condition is a metabolic disorder.

[0147] Exemplary diseases and target genes (e.g., loci of interest) include Amyloid neuropathy (TTR, PALB); Amyloidosis (APOA1, APP, AAA, CVAP, AD1, GSN, FGA, LYZ, TTR, PALB); Cirrhosis (KRT18, KRT8, CIRH1A, NAIC, TEX292, KIAA1988); Cystic fibrosis (CFTR, ABCC7, CF, MRP7); Glycogen storage diseases (SLC2A2, GLUT2, G6PC, G6PT, G6PT1, GAA, LAMP2, LAMPB, AGL, GDE, GBE1, GYS2, PYGL, PFKM); Hepatic adenoma, 142330 (TCF1, HNF1A, MODY3), Hepatic failure, early onset, and neurologic disorder (SCOD1, SCO1), Hepatic lipase deficiency (LIPC), Hepatoblastoma, cancer and carcinomas (CTNNB1, PDGFRL, PDGRL, PRLTS, AXIN1, AXIN, CTNNB1, TP53, P53, LFS1, IGF2R, MPRI, MET, CASP8, MCH5; Medullary cystic kidney disease (UMOD, HNFJ, FJHN, MCKD2, ADMCKD2); Phenylketonuria (PAH, PKU1, QDPR, DHPR, PTS); Polycystic kidney and hepatic disease (FCYT, PKHD1, ARPKD, PKD1, PKD2, PKD4, PKDTS, PRKCSH, G19P1, PCLD, SEC63). Other preferred targets include any one or more of include one or more of: PCSK9; Hmgcr; SERPINA1; ApoB; LDL; Huntington disease (Huntington), Hemochromatosis (HEF), Duchenne muscular dystrophy (Dystrophin), Sickle cell anemia (Beta Globin), and Tay-Sachs (hexosaminidase A)

[0148] It will be appreciated that where reference is made to a use or method of treating or modifying an organism or mammal including human or a non-human mammal or organism by manipulation of a target editing site in a genomic locus of interest, this may apply to the organism (or mammal) as a whole or just a single cell or population of cells from that organism (if the organism is multicellular). In the case of humans, for instance, Applicants envisage, inter alia, a single cell or a population of cells and these may preferably be modified ex vivo and then re-introduced. In this case, a biopsy or other tissue or biological fluid sample may be necessary. Stem cells are also particularly preferred in this regard. But, of course, in vivo embodiments are also envisaged.

[0149] The method or use may be ex vivo or in vitro, for instance in a cell culture or in an ex vivo or in vitro model (such as an organoid or ‘animal or plant cell on a chip’). Alternatively, the method may be in vivo, in which case it may also include isolating the first population of cells from the subject and transplanting the second population of cells (back) into the subject. Gene perturbation may be for one or more, or two or more, or three or more, or four or more genes.

### Related Disclosure

[0150] Target Sequences or Target Genes: Embodiments of the polynucleotides, compositions, engineered systems, and methods disclosed herein are useful in editing or effecting a sequence-specific modification of a target DNA sequence or target gene in a DNA molecule, a chromosome, or a genome. In embodiments, the target sequence or target gene includes coding sequence (DNA encoding a polypeptide, such as a structural protein or an enzyme), non-coding sequence, or both coding and non-coding sequence. In embodiments, the target sequence or target gene is a gene of a pest or pathogen of a non-human animal, a human, or a plant; important target genes include genes of invertebrate pests (e.g., arthropods, nematodes, and mollusks) of plants, and invertebrate parasites of animals. In embodiments, the target sequence or target gene includes regulatory sequence or translatable (coding) sequence for genes encoding transcription factors and genes encoding enzymes involved in the biosynthesis or catabolism of molecules of interest (such as, but not limited to, amino acids, fatty acids and other lipids, sugars and other carbohydrates, biological polymers, and secondary metabolites including alkaloids, terpenoids, polyketides, non-ribosomal peptides, and secondary metabolites of mixed biosynthetic origin). In embodiments, the target gene is an endogenous gene of a eukaryotic cell; in other embodiments, the target gene is an exogenous gene (e.g., a transgene) in a eukaryotic cell. In embodiments, the target sequence or target gene is a gene that is involved in one or more small RNA-mediated (sRNA-mediated) silencing pathways, i.e., a gene involved in RNA-mediated sequence-specific inhibition of gene expression wherein silencing may occur at transcription, post-transcription, or translation, and wherein the sRNA-mediated silencing pathways can be classified by the biosynthesis, biogenesis, and recognition of types of regulatory sRNAs, e.g., short interfering RNAs (siRNAs), microRNAs (miRNAs), and phased sRNAs; possible target sequences include DNA encoding a regulatory RNA (e.g., DNA encoding a pre-miRNA or miRNA precursor, or DNA encoding a recognition site for a mature miRNA or an siRNA) and DNA encoding any of the participating sRNA silencing pathway proteins (e.g., RDR6, SDE3, RDR2, WEX, SGS3, DCL2-4, UPF1, UPF3, HEN1, NRPD1A, NRPD2, DRD1, HDA6, AGO1, and MOP1); see, e.g., U.S. Pat. No. 9,222,100, incorporated herein by reference. Examples of non-coding sequences include DNA encoding long non-coding RNAs (lncRNAs), DNA encoding microRNAs (miRNAs), DNA encoding tRNAs or ribosomal RNAs (rRNAs), DNA encoding untranscribed regions that are located 5′ to or 3′ to DNA encoding a polypeptide, and DNA encoding regulatory elements (e.g., promoters, enhancers, introns, terminators, silencers, insulators). In embodiments, the target DNA is genomic DNA, e.g., genomic DNA or nuclear DNA of a eukaryote. In embodiments, the target DNA is mitochondrial or plastid DNA, e.g., mitochondrial DNA of a non-human animal, an animal, or a plant, or plastid DNA of a plant or eukaryotic alga.

[0151] Eukaryotic Cells and Eukaryotic Species of Interest: Embodiments of the polynucleotides, compositions, engineered systems, and methods disclosed herein are useful in genome editing of eukaryotes, cells of eukaryotes, and DNA obtained from eukaryotes. In embodiments, the polynucleotides, compositions, engineered systems, and methods disclosed herein are useful in genome editing of non-human animals and non-human animal cells, non-human animal stem cells, human cells, human stem cells, and human somatic (non-gametic) cells; isolated tissue (e.g., nervous tissue, epithelial tissue, liver, spleen, pancreas, muscle tissue, bone, connective tissue, endocrine system tissues, and tumours) or cells (e.g., blood cells, erythrocytes, leukocytes, lymphocytes, liver cells, bone cells, immune cells, T cells, B cells, dendritic cells, and tumour cells) or cell organelles (e.g., mitochondria or chloroplasts, either isolated or contained within the eukaryotic cell, tissue, or organism) obtained from a non-human animal or from a human; engineered hybridoma cells; fungi, fungal cells, plants, plant tissue, plant cells, and seeds. In embodiments, the polynucleotides, compositions, engineered systems, and methods disclosed herein are useful in genome editing of a non-human animal cell (e.g., a cell of an animal selected from the group consisting of invertebrates, vertebrates, insects, arthropods, mollusks, fish, reptiles, amphibians, birds, mammals, primates, and non-human primates), a human cell, a plant cell, or a fungal cell. In embodiments, the eukaryotic cell, tissue, or cell organelle is obtained from an economically or agriculturally important animal species, such as, but not limited to, bees, fruit flies, shrimp, oysters, clams, mussels, salmon, trout, carp, tilapia, catfish, barramundi, striped bass, pigeons, chickens, turkeys, ducks, geese, goats, sheep, cattle, water buffalo, horses, pigs, dogs, cats, rabbits, mice, and rats. In embodiments, the eukaryotic cell is in vitro, ex vivo, or in vivo. In embodiments, the eukaryotic cell is a non-human animal stem cell or a non-human animal gametic cell, from which a non-animal tissue or even an intact animal can be developed. In embodiments, the polynucleotides, compositions, engineered systems, and methods disclosed herein are useful in editing of eukaryotic DNA (e.g., genomic DNA) in vitro. In embodiments, the polynucleotides encoding the Cas12a nuclease and Cas12a nuclease variants described herein are codon-optimized, in whole or in part, for the eukaryotic species wherein the Cas12a editing system is to be employed. In an embodiment, a codon-optimized polynucleotide encoding a Cas12a nuclease contains one or more codons selected for having a high frequency for specifying a given amino acid in the eukaryotic species in which the codon-optimized polynucleotide is to be introduced or expressed. Codon usage or bias is known in the art for various eukaryotes; see, e.g., Quax et al. (2015) Molecular Cell, 59:149-161. See also U.S. Pat. No. 6,015,891, incorporated herein by reference.

[0152] In embodiments, the polynucleotides, compositions, engineered systems, and methods disclosed herein are useful in genome editing of plants, plant tissue (including callus), plant cells, or plant protoplasts obtained from any monocot or dicot plant species of interest, for example, row crop plants, fruit-producing plants and trees, vegetables, trees, and ornamental plants including ornamental flowers, shrubs, trees, groundcovers, and turf grasses. Examples of plants, plant tissue, plant cells, or plant protoplasts that are useful in such genome editing include whole plant, intact nodal bud, shoot apex or shoot apical meristem, root apex or root apical meristem, lateral meristem, intercalary meristem, seedling, whole seed, halved seed or other seed fragment, zygotic embryo, somatic embryo, ovule, pollen, microspore, anther, hypocotyl, cotyledon, leaf, petiole, stem, tuber, root, callus, or plant cell or plant protoplast cultures. Plants or plant tissues or cells can be haploid, inducibly haploid, haploid-inducing, diploid, or polyploid. Plant species of interest include, but are not limited to, alfalfa (Medicago sativa), almonds (Prunus dulcis), apples (Malus x domestica), apricots (Prunus armeniaca, P. brigantine, P. mandshurica, P. mume, P. sibirica), asparagus (Asparagus officinalis), bananas (Musa spp.), barley (Hordeum vulgare), beans (Phaseolus spp.), blueberries and cranberries (Vaccinium spp.), cacao (Theobroma cacao), canola and rapeseed or oilseed rape, (Brassica napus), carnation (Dianthus caryophyllus), carrots (Daucus carota sativus), cassava (Manihot esculentum), cherry (Prunus avium), chickpea (Cider arietinum), chicory (Cichorium intybus), chili peppers and other capsicum peppers (Capsicum annuum, C. frutescens, C. chinense, C. pubescens, C. baccatum), chrysanthemums (Chrysanthemum spp.), coconut (Cocos nucifera), coffee (Coffea spp. including Coffea arabica and Coffea canephora), cotton (Gossypium hirsutum L.), cowpea (Vigna unguiculata), cucumber (Cucumis sativus), currants and gooseberries (Ribes spp.), eggplant or aubergine (Solanum melongena), eucalyptus (Eucalyptus spp.), flax (Linum usitatissumum L.), geraniums (Pelargonium spp.), grapefruit (Citrus x paradisi), grapes (Vitus spp.) including wine grapes (Vitus vinifera), guava (Psidium guajava), irises (Iris spp.), lemon (Citrus limon), lettuce (Lactuca sativa), limes (Citrus spp.), maize (Zea mays L.), mango (Mangifera indica), mangosteen (Garcinia mangostana), melon (Cucumis melo), millets (Setaria spp, Echinochloa spp, Eleusine spp, Panicum spp., Pennisetum spp.), oats (Avena sativa), oil palm (Ellis quineensis), olive (Olea europaea), onion (Allium cepa), orange (Citrus sinensis), papaya (Carica papaya), peaches and nectarines (Prunus persica), pear (Pyres spp.), pea (Pisa sativum), peanut (Arachis hypogaea), peonies (Paeonia spp.), petunias (Petunia spp.), pineapple (Ananas comosus), plantains (Musa spp.), plum (Prunus domestica), poinsettia (Euphorbia pulcherrima), Polish canola (Brassica rapa), poplar (Populus spp.), potato (Solanum tuberosum), pumpkin (Cucurbita pepo), rice (Oryza sativa L.), roses (Rosa spp.), rubber (Hevea brasiliensis), rye (Secale cereale), safflower (Carthamus tinctorius L), sesame seed (Sesame indium), sorghum (Sorghum bicolor), soybean (Glycine max L.), squash (Cucurbita pepo), strawberries (Fragaria spp., Fragaria x ananassa), sugar beet (Beta vulgaris), sugarcanes (Saccharum spp.), sunflower (Helianthus annuus), sweet potato (Ipomoea batatas), tangerine (Citrus tangerina), tea (Camellia sinensis), tobacco (Nicotiana tabacum L.), tomato (Lycopersicon esculentum), tulips (Tulipa spp.), turnip (Brassica rapa rapa), walnuts (Juglans spp. L.), watermelon (Citrulus lanatus), wheat (Tritium aestivum), or yams (Discorea spp.).

[0153] Nuclease Fusions and Complexes: In embodiments, the Cas12a nuclease is a fusion protein, e.g., wherein the Cas12a nuclease is covalently bound through a peptide bond to a cell-penetrating peptide, a nuclear localization signal peptide, a chloroplast transit peptide, or a mitochondrial targeting peptide; such fusion proteins are conveniently encoded in a single nucleotide sequence, optionally including codons for linking amino acids. In embodiments, the Cas12a nuclease is a fusion protein, wherein the Cas12a nuclease is covalently bound to another polypeptide via a linker polypeptide, for example, via a glycine polymer (G)₁₁, a glycine-serine polymer, a glycine-alanine polymer, and an alanine-serine polymer. In embodiments, the Cas12a nuclease is chemically conjugated to another polypeptide, e.g., via a non-peptide covalent bond. In embodiments, the Cas12a nuclease is associated with another polypeptide via a non-covalent bond. In embodiments, the Cas12a nuclease is a fusion protein, wherein the Cas12a nuclease is covalently bound to a protein (or a domain from a protein) that inhibits transcription (e.g., a protein that represses transcription, recruits transcription inhibitor proteins, modifies a target DNA through a process such as methylation, recruits a DNA modifier, modulates histones associated with a target DNA, recruits a histone modifier such as those that modify acetylation and/or methylation of histones, or similar functions). Examples of proteins (or fragments thereof) that can be used in decrease transcription include but are not limited to: transcriptional repressors such as the Krüppel associated box (KRAB or SKD); KOX1 repression domain; the Mad mSIN3 interaction domain (SID); the ERF repressor domain (ERD), the SRDX repression domain (e.g., for repression in plants), and the like; histone lysine methyltransferases such as Pr-SET7/8, SUV4-20H1, RIZ1, and the like; histone lysine demethylases such as JMJD2A/JHDM3A, JMJD2B, JMJD2C/GASC1, JMJD2D, JARID1A/RBP2, JARID1B/PLU-1, JARID1C/SMCX, JARID1D/SMCY, and the like; histone lysine deacetylases such as HDAC1, HDAC2, HDAC3, HDAC8, HDAC4, HDAC5, HDAC7, HDAC9, SIRT1, SIRT2, HDAC11, and the like; DNA methylases such as Hhal DNA m5c-methyltransferase (M.Hhal), DNA methyltransferase 1 (DNMT1), DNA methyltransferase 3a (DNMT3a), DNA methyltransferase 3b (DNMT3b), MET1, DRM3 (plants), ZMET2, CMT1, CMT2 (plants), and the like; and periphery recruitment elements such as Lamin A, Lamin B, and the like. In embodiments, the Cas12a nuclease is a fusion protein, wherein the Cas12a nuclease is covalently bound to a protein (or a domain from a protein) that increases transcription (e.g., a protein that activates transcription, recruits transcription activator proteins, modifies a target DNA through a process such as demethylation, recruits a DNA modifier, modulates histones associated with a target DNA, recruits a histone modifier such as those that modify acetylation and/or methylation of histones, or similar functions). Examples of proteins (or fragments thereof) that can be used in increase transcription include but are not limited to: transcriptional activators such as VP16, VP64, VP48, VP160, p65 subdomain (e.g., from NFkB), and activation domain of EDLL and/or TAL activation domain (e.g., for activity in plants); histone lysine methyltransferases such as SET1A, SET1B, MLL1 to 5, ASH1, SYMD2, NSD1, and the like; histone lysine demethylases such as IHDM2a/b, UTX, JMJD3, and the like; histone acetyltransferases such as GCN5, PCAF, CBP, p300, TAF1, TIP60/PLIP, MOZ/MYST3, MORF/MYST4, SRC1, ACTR, P160, CLOCK, and the like; and DNA demethylases such as Ten-Eleven Translocation (TET) dioxygenase 1 (TET1CD), TET1, DME, DML1, DML2, ROS1, and the like. In embodiments, the Cas12a nuclease is a fusion protein, wherein the Cas12a nuclease is covalently bound to a heterologous polypeptide that has enzymatic activity that modifies a target nucleic acid (e.g., ssRNA, dsRNA, ssDNA, dsDNA), for example, nuclease activity such as that provided by a restriction enzyme (e.g., Fokl nuclease), methyltransferase activity such as that provided by a methyltransferase (e.g., Hhal DNA m5c-methyltransferase, M.Hhal), DNA methyltransferase 1 (DNMT1), DNA methyltransferase 3a (DNMT3a), DNA methyltransferase 3b (DNMT3b), MET1, DRM3 (plants), ZMET2, CMT1, CMT2 (plants), and the like); demethylase activity such as that provided by a demethylase (e.g., Ten-Eleven Translocation (TET) dioxygenase 1 (TET1CD), TET1, DME, DML1, DML2, ROS 1, and the like), DNA repair activity, DNA damage activity, deamination activity such as that provided by a deaminase (e.g., a cytosine deaminase enzyme such as rat APOBEC1), dismutase activity, alkylation activity, depurination activity, oxidation activity, pyrimidine dimer forming activity, integrase activity such as that provided by an integrase and/or resolvase (e.g., Gin invertase such as the hyperactive mutant of the Gin invertase, GinH106Y; human immunodeficiency virus type 1 integrase (IN); Tn3 resolvase; and the like), transposase activity, recombinase activity such as that provided by a recombinase (e.g., catalytic domain of Gin recombinase), polymerase activity, ligase activity, helicase activity, photolyase activity, and glycosylase activity). In embodiments, the Cas12a nuclease is a fusion protein, wherein the Cas12a nuclease is covalently bound to a heterologous polypeptide that has enzymatic activity that modifies a polypeptide (e.g., a histone) associated with a target nucleic acid (e.g., ssRNA, dsRNA, ssDNA, dsDNA), for example, methyltransferase activity such as that provided by a histone methyltransferase (HMT) (e.g., suppressor of variegation 3-9 homolog 1 (SUV39H1, also known as KMTIA), euchromatic histone lysine methyltransferase 2 (G9A, also known as KMT1C and EHMT2), SUV39H2, ESET/SETDB 1, and the like, SET1A, SET1B, MLL1 to 5, ASH1, SYMD2, NSD1, DOT1L, Pr-SET7/8, SUV4-20H1, EZH2, RIZl), demethylase activity such as that provided by a histone demethylase (e.g., Lysine Demethylase 1A (KDM1A also known as LSD1), JHDM2a/b, JMJD2A/JHDM3A, JMJD2B, JMJD2C/GASC1, JMJD2D, JARID1A/RBP2, JARID1B/PLU-1, JARID1C/SMCX, JARID1D/SMCY, UTX, JMJD3, and the like), acetyltransferase activity such as that provided by a histone acetylase transferase (e.g., catalytic core/fragment of the human acetyltransferase p300, GCN5, PCAF, CBP, TAF1, TIP60/PLIP, MOZ/MYST3, MORF/MYST4, HB01/MYST2, HMOF/MYST1, SRC1, ACTR, P160, CLOCK, and the like), deacetylase activity such as that provided by a histone deacetylase (e.g., HDAC1, HDAC2, HDAC3, HDAC8, HDAC4, HDAC5, HDAC7, HDAC9, SIRT1, SIRT2, HDAC11, and the like), kinase activity, phosphatase activity, ubiquitin ligase activity, deubiquitinating activity, adenylation activity, deadenylation activity, SUMOylating activity, deSUMOylating activity, ribosylation activity, deribosylation activity, myristoylation activity, and demyristoylation activity. In embodiments, the Cas12a nuclease is a fusion protein, wherein the Cas12a nuclease is covalently bound to a dihydrofolate reductase (DHFR) destabilization domain (e.g., to generate a chemically controllable chimeric Cas12a nuclease).

[0154] In embodiments, the Cas12a nuclease or a polynucleotide that encodes the Cas12a nuclease or a ribonucleoprotein including the Cas12a nuclease is provided as a complex with a cell-penetrating peptide or other transfecting agent. In embodiments, the Cas12a nuclease or a polynucleotide that encodes the Cas12a nuclease or a ribonucleoprotein including the Cas12a nuclease is complexed with, or covalently or non-covalently bound to, a further element, e.g., a carrier molecule, an antibody, an antigen, a viral movement protein, a polymer, a detectable label (e.g., a moiety detectable by fluorescence, radioactivity, or enzymatic or immunochemical reaction), a quantum dot, or a particulate or nanoparticulate.

[0155] In some cases, the fusion partner can modulate transcription (e.g., inhibit transcription, increase transcription) of a target DNA. For example, in some cases the fusion partner

[0156] Vectors: In certain embodiments, a vector or an expression cassette contained in a vector includes additional components, e.g., a polynucleotide encoding a drug resistance or herbicide gene or a polynucleotide encoding a detectable marker such as green fluorescent protein (GFP) or beta-glucuronidase (gus) to allow convenient screening or selection of cells expressing the vector. In embodiments, the vector or expression cassette includes additional elements for improving delivery to a plant cell or plant protoplast or for directing or modifying expression of one or more genome-editing system elements, for example, fusing a sequence encoding a cell-penetrating peptide, localization signal, transit, or targeting peptide to the Cas12a nuclease, or adding a nucleotide sequence to stabilize a guide RNA; such fusion proteins (and the polypeptides encoding such fusion proteins) or combination polypeptides, as well as expression cassettes and vectors for their expression in a cell, are specifically claimed. In embodiments, a Cas12a nuclease is fused to a localization signal, transit, or targeting peptide, e.g., a nuclear localization signal (NLS), a chloroplast transit peptide (CTP), or a mitochondrial targeting peptide (MTP); in a vector or an expression cassette, the nucleotide sequence encoding any of these can be located either 5′ and/or 3′ to the DNA encoding the nuclease. CRISPR nuclease fusion proteins containing nuclear localization signals and codon-optimized for expression in maize are disclosed in U.S. patent application Ser. No. 15/120,110, published as U.S. Patent Application Publication 2017/0166912, national phase application claiming priority to PCT/US2015/018104 (published as WO/2015/131101 and claiming priority to U.S. Provisional Patent Application 61/945,700), incorporated herein by reference. In another example, a chloroplast-targeting RNA is appended to the 5′ end of an mRNA encoding an endonuclease to drive the accumulation of the mRNA in chloroplasts; see Gomez, et al. (2010) Plant Signal Behav., 5: 1517-1519. In an embodiment, a Cas12a nuclease is fused to a nuclear localization signal (NLS), such as the NLS from SV40. In an embodiment, a Cas12a nuclease is fused to a cell-penetrating peptide (CPP), such as octa-arginine or nona-arginine or a homoarginine 12-mer oligopeptide, or a CPP disclosed in the database of cell-penetrating peptides CPPsite 2.0, publicly available at crdd[dot]osdd[dot]net/raghava/cppsite/. In an embodiment, a Cas12a nuclease is fused to a chloroplast transit peptide (CTP) sequence. In embodiments, a CTP sequence is obtained from any nuclear gene that encodes a protein that targets a chloroplast, and the isolated or synthesized CTP DNA is appended to the 5′ end of the DNA that encodes a Cas12a nuclease targeted for use in a chloroplast. Chloroplast transit peptides and their use are described in U.S. Pat. Nos. 5,188,642, 5,728,925, and 8,420,888, all of which are incorporated herein by reference in their entirety. Specifically, the CTP nucleotide sequences provided with the sequence identifier (SEQ ID) numbers 12-15 and 17-22 of U.S. Pat. No. 8,420,888 are incorporated herein by reference. In an embodiment, a Cas12a nuclease is fused to a mitochondrial targeting peptide (MTP), such as a plant MTP sequence; see, e.g., Jores et al. (2016) Nature Communications, 7:12036-12051.

[0157] Plasmids designed for use in plants and encoding CRISPR genome editing elements (CRISPR nucleases and guide RNAs) are publicly available from plasmid repositories such as Addgene (Cambridge, Mass.; also see “addgene[dot]com”) or can be designed using publicly disclosed sequences, e.g., sequences of CRISPR nucleases. In embodiments, such plasmids are used to co-express both Cas12a nuclease mRNA and guide RNA(s) (Cas12a crRNA(s)); in other embodiments, Cas12a nuclease mRNA and guide RNA (Cas12a crRNA) are encoded on separate plasmids. In embodiments, the plasmids are Agrobacterium TI plasmids. Materials and methods for preparing expression cassettes and vectors for CRISPR endonuclease and guide RNA for stably integrated and/or transient plant transformation are disclosed in U.S. patent application Ser. No. 15/120,110, published as U.S. Patent Application Publication 2017/0166912, national phase application claiming priority to PCT/US2015/018104 (published as WO/2015/131101 and claiming priority to U.S. Provisional Patent Application 61/945,700), U.S. Patent Application Publication 2015/0082478 A1, and PCT/US2015/038767 (published as WO/2016/007347 and claiming priority to U.S. Provisional Patent Application 62/023,246), all of which are incorporated herein by reference in their entirety. In embodiments, such expression cassettes are isolated linear fragments, or are part of a larger construct that includes bacterial replication elements and selectable markers; such embodiments are useful, e.g., for particle bombardment or nanoparticle delivery or protoplast transformation. In embodiments, the expression cassette is adjacent to or located between T-DNA borders or contained within a binary vector, e.g., for Agrobacterium-mediated transformation. In embodiments, a plasmid encoding a Cas12a nuclease is delivered to a cell (such as a plant cell or a plant protoplast) for stable integration of the Cas12a nuclease into the genome of the cell, or alternatively for transient expression of the Cas12a nuclease. In embodiments, plasmids encoding a Cas12a nuclease are delivered to a plant cell or a plant protoplast to achieve stable or transient expression of the Cas12a nuclease, and one or multiple guide RNAs (Cas12a crRNAs) (such as a library of individual guide RNAs or multiple pooled guide RNAs) or plasmids encoding the guide RNAs are delivered to the plant cell or plant protoplast individually or in combinations, thus providing libraries or arrays of plant cells or plant protoplasts (or of plant callus or whole plants derived therefrom), in which a variety of genome edits are provided by the different guide RNAs (Cas12a crRNAs).

[0158] In embodiments, the polynucleotides, ribonucleoproteins, DNA expression systems, and engineered systems are delivered to a eukaryotic cell using a viral vector. Viral vectors especially useful in animal cells include viral vectors based on vaccinia virus; poliovirus; adenovirus (see, e.g., Li et al., Invest Opthalmol Vis Sci 35:2543 2549, 1994; Borras et al, Gene Ther 6:515 524, 1999; Li and Davidson, PNAS 92:7700 7704, 1995; Sakamoto et al., H Gene Ther 5: 1088 1097, 1999; WO 94/12649, WO 93/03769; WO 93/19191; WO 94/28938; WO 95/11984 and WO 95/00655); adeno-associated virus (AAV) (see, e.g., Ali et al., Hum Gene Ther 9:81 86, 1998, Flannery et al., PNAS 94:6916 6921, 1997; Bennett et al., Invest Opthalmol Vis Sci 38:2857 2863, 1997; Jomary et al., Gene Ther 4:683 690, 1997, Rolling et al., Hum Gene Ther 10:641 648, 1999; Ali et al., Hum Mol Genet 5:591 594, 1996; Srivastava in WO 93/09239, Samulski et al., J. Vir. (1989) 63:3822-3828; Mendelson et al., Virol. (1988) 166:154-165; and Flotte et al., PNAS (1993) 90: 10613-10617); SV40; herpes simplex virus; human immunodeficiency virus (see, e.g., Miyoshi et al., PNAS 94: 10319 23, 1997; Takahashi et al., J Virol 73:7812 7816, 1999); a retroviral vector (e.g., Murine Leukemia Virus, spleen necrosis virus, and vectors derived from retroviruses such as Rous Sarcoma Virus, Harvey Sarcoma Virus, avian leukosis virus, a lentivirus, human immunodeficiency virus, myeloproliferative sarcoma virus, and mammary tumor virus); and the like. In some cases, a recombinant expression vector of the present disclosure is a recombinant adeno-associated virus (AAV) vector. In some cases, a recombinant expression vector of the present disclosure is a recombinant lentivirus vector. In some cases, a recombinant expression vector of the present disclosure is a recombinant retroviral vector. Viral vectors especially useful in plant cells include geminiviruses, begomoviruses, tobamoviruses, potex viruses, comoviruses, wheat streak mosaic virus, barley stripe mosaic virus, bean yellow dwarf virus, bean pod mottle virus, cabbage leaf curl virus, beet curly top virus, tobacco yellow dwarf virus, tobacco rattle virus, potato virus X, and cowpea mosaic virus.

[0159] In embodiments, the polynucleotides, ribonucleoproteins, DNA expression systems, and engineered systems are delivered to a plant cell using a bacterial vector. In embodiments of the method, the engineered system or a component thereof is delivered via at least one bacterial vector capable of transforming a plant cell and selected from the group consisting of Agrobacterium sp., Rhizobium sp., Sinorhizobium (Ensifer) sp., Mesorhizobium sp., Bradyrhizobium sp., Azobacter sp., and Phyllobacterium sp.

[0160] Delivery Methods and Delivery Agents: The polynucleotides, ribonucleoproteins, DNA expression systems, engineered systems, and vectors (collectively referred to here as “genome editing reagents”) that are aspects of the invention can be delivered to a eukaryotic cell, such as a plant cell, using various techniques and agents. In embodiments, one or more treatments is employed to deliver genome editing reagents into a plant cell or plant protoplast, e.g., through barriers such as a cell wall or a plasma membrane or nuclear envelope or other lipid bilayer. In an embodiment, genome editing reagents are delivered directly, for example by direct contact of the polynucleotide composition with a plant cell or plant protoplast. A genome editing reagent-containing composition in the form of a liquid, a solution, a suspension, an emulsion, a reverse emulsion, a colloid, a dispersion, a gel, liposomes, micelles, an injectable material, an aerosol, a solid, a powder, a particulate, a nanoparticle, or a combination thereof can be applied directly to a eukaryotic cell, such as a non-human animal cell, a human cell, a fungal cell, or a plant cell or plant protoplast (e.g., through abrasion or puncture or otherwise disruption of the cell wall or cell membrane, by spraying or dipping or soaking or otherwise directly contacting, by microinjection). For example, a eukaryotic cell, such as a non-human animal cell, a human cell, a fungal cell, or a plant cell or plant protoplast is soaked in a liquid genome editing reagent-containing composition, whereby the genome editing reagent is delivered to the plant cell or plant protoplast. In embodiments, the genome editing reagent-containing composition is delivered using negative or positive pressure, for example, using vacuum infiltration or application of hydrodynamic or fluid pressure. In embodiments, the genome editing reagent-containing composition is introduced into a eukaryotic cell, such as a non-human animal cell, a human cell, a fungal cell, or a plant cell or plant protoplast, e.g., by microinjection or by disruption or deformation of the cell wall or cell membrane, for example by physical treatments such as by application of negative or positive pressure, shear forces, or treatment with a chemical or physical delivery agent such as surfactants, liposomes, or nanoparticles; see, e.g., delivery of materials to cells employing microfluidic flow through a cell-deforming constriction as described in U.S. Published Patent Application 2014/0287509, incorporated by reference in its entirety herein. Other techniques useful for delivering the genome editing reagent-containing composition to a eukaryotic cell, such as a non-human animal cell, a human cell, a fungal cell, or a plant cell or plant protoplast include: ultrasound or sonication; vibration, friction, shear stress, vortexing, cavitation; centrifugation or application of mechanical force; mechanical cell wall or cell membrane deformation or breakage; enzymatic cell wall or cell membrane breakage or permeabilization; abrasion or mechanical scarification (e.g., abrasion with carborundum or other particulate abrasive or scarification with a file or sandpaper) or chemical scarification (e.g., treatment with an acid or caustic agent); and electroporation. In embodiments, the genome editing reagent-containing composition is provided to a plant cell or plant protoplast by bacterially mediated (e.g., Agrobacterium sp., Rhizobium sp., Sinorhizobium sp., Mesorhizobium sp., Bradyrhizobium sp., Azobacter sp., Phyllobacterium sp.) transfection of the plant cell or plant protoplast with a polynucleotide encoding the gRNA; see, e.g., Broothaerts et al. (2005) Nature, 433:629-633. Any of these techniques or a combination thereof are alternatively employed on the plant part or tissue or intact plant (or seed) from which a plant cell or plant protoplast is optionally subsequently obtained or isolated; in embodiments, the genome editing reagent-containing composition is delivered in a separate step after the plant cell or plant protoplast has been obtained or isolated.

[0161] In embodiments, a treatment employed in delivery of a genome editing reagent to a eukaryotic cell, such as a non-human animal cell, a human cell, a fungal cell, or a plant cell or plant protoplast is carried out under a specific thermal regime, which can involve one or more appropriate temperatures, e.g., chilling or cold stress (exposure to temperatures below that at which normal growth of the eukaryotic cell occurs), or heating or heat stress (exposure to temperatures above that at which normal growth of the eukaryotic cell occurs), or treating at a combination of different temperatures. In embodiments, a specific thermal regime is carried out on the eukaryotic cell, such as a non-human animal cell, a human cell, a fungal cell, or plant cell or plant protoplast, in one or more steps separate from the genome editing reagent delivery. In embodiments, a specific thermal regime is carried out on a plant cell or plant protoplast, or on a plant or plant part from which a plant cell or plant protoplast is subsequently obtained or isolated, in one or more steps separate from the genome editing reagent delivery.

[0162] A Cas12a nuclease or a polynucleotide that encodes the Cas12a nuclease or a ribonucleoprotein including the Cas12a nuclease can be provided to a cell (e.g., a plant cell) by any suitable technique. In embodiments, the Cas12a nuclease or a polynucleotide that encodes the Cas12a nuclease or a ribonucleoprotein including the Cas12a nuclease is provided in a solution, or is provided in a liposome, micelle, emulsion, reverse emulsion, suspension, or other mixed-phase composition. In embodiments, the Cas12a nuclease or a polynucleotide that encodes the Cas12a nuclease or a ribonucleoprotein including the Cas12a nuclease is provided by directly contacting a plant cell or plant protoplast with the Cas12a nuclease or a polynucleotide that encodes the Cas12a nuclease or a ribonucleoprotein including the Cas12a nuclease. In embodiments, the Cas12a nuclease or a polynucleotide that encodes the Cas12a nuclease or a ribonucleoprotein including the Cas12a nuclease is provided by transporting the Cas12a nuclease or a polynucleotide that encodes the Cas12a nuclease or a ribonucleoprotein including the Cas12a nuclease into a plant cell or plant protoplast using a chemical, enzymatic, or physical agent. In embodiments, the Cas12a nuclease is provided by bacterially mediated (e.g., Agrobacterium sp., Rhizobium sp., Sinorhizobium sp., Mesorhizobium sp., Bradyrhizobium sp., Azobacter sp., Phyllobacterium sp.) transfection of a plant cell or plant protoplast with a polynucleotide encoding the Cas12a nuclease; see, e.g., Broothaerts et al. (2005) Nature, 433:629-633. In an embodiment, the Cas12a nuclease is provided by transcription in a plant cell or plant protoplast of a DNA that encodes the Cas12a nuclease and is stably integrated in the genome of the plant cell or plant protoplast or that is provided to the plant cell or plant protoplast in the form of a plasmid or expression vector (e.g., a viral vector) that encodes the Cas12a nuclease. In embodiments, the Cas12a nuclease is provided to the plant cell or plant protoplast as a polynucleotide that encodes the Cas12a nuclease, e.g., in the form of an mRNA encoding the nuclease.

[0163] In embodiments, a whole plant or plant part or seed, or an isolated plant cell or plant protoplast, or the plant or plant part from which a plant cell or plant protoplast is obtained or isolated, is treated with one or more delivery agents which can include at least one chemical, enzymatic, or physical agent, or a combination thereof. In embodiments, a genome editing reagent-containing composition further includes one or more one chemical, enzymatic, or physical agent for delivery. Treatment with the chemical, enzymatic or physical agent can be carried out simultaneously with the genome editing reagent delivery, or in one or more separate steps that precede or follow the genome editing reagent delivery. In embodiments, a chemical, enzymatic, or physical agent, or a combination of these, is associated or complexed with a genome editing reagent composition; examples of such associations or complexes include those involving non-covalent interactions (e.g., ionic or electrostatic interactions, hydrophobic or hydrophilic interactions, formation of liposomes, micelles, or other heterogeneous composition) and covalent interactions (e.g., peptide bonds, bonds formed using cross-linking agents). In non-limiting examples, a genome editing reagent is provided as a liposomal complex with a cationic lipid, or as a complex with a carbon nanotube, or as a fusion protein between the nuclease and a cell-penetrating peptide. Examples of agents useful for delivering a genome editing reagent include the various cationic liposomes and polymer nanoparticles reviewed by Zhang et al. (2007) J. Controlled Release, 123:1-10, and the cross-linked multilamellar liposomes described in U.S. Patent Application Publication 2014/0356414 A1, incorporated by reference in its entirety herein.

[0164] In embodiments, the chemical agent is at least one selected from the group consisting of:

[0165] (a) solvents (e.g., water, dimethylsulfoxide, dimethylformamide, acetonitrile, N-pyrrolidine, pyridine, hexamethylphosphoramide, alcohols, alkanes, alkenes, dioxanes, polyethylene glycol, and other solvents miscible or emulsifiable with water or that will dissolve phosphonucleotides in non-aqueous systems);

[0166] (b) fluorocarbons (e.g., perfluorodecalin, perfluoromethyldecalin);

[0167] (c) glycols or polyols (e.g., propylene glycol, polyethylene glycol);

[0168] (d) surfactants, including cationic surfactants, anionic surfactants, non-ionic surfactants, and amphiphilic surfactants, e.g., alkyl or aryl sulfates, phosphates, sulfonates, or carboxylates; primary, secondary, or tertiary amines; quaternary ammonium salts; sultaines, betaines; cationic lipids; phospholipids; tallowamine; bile acids such as cholic acid; long chain alcohols; organosilicone surfactants including nonionic organosilicone surfactants such as trisiloxane ethoxylate surfactants or a silicone polyether copolymer such as a copolymer of polyalkylene oxide modified heptamethyl trisiloxane and allyloxypolypropylene glycol methylether (commercially available as SILWET L-77™ brand surfactant having CAS Number 27306-78-1 and EPA Number CAL. REG. NO. 5905-50073-AA, Momentive Performance Materials, Inc., Albany, N.Y.); specific examples of useful surfactants include sodium lauryl sulfate, the Tween series of surfactants, Triton-X100, Triton-X114, CHAPS and CHAPSO, Tergitol-type NP-40, Nonidet P-40;

[0169] (e) lipids, lipoproteins, lipopolysaccharides;

[0170] (f) acids, bases, caustic agents;

[0171] (g) peptides, proteins, or enzymes (e.g., cellulase, pectolyase, maceroenzyme, pectinase), including cell-penetrating or pore-forming peptides (e.g., (BO100)2K8, Genscript; poly-lysine, poly-arginine, or poly-homoarginine peptides; gamma zein, see U.S. Patent Application publication 2011/0247100, incorporated herein by reference in its entirety; transcription activator of human immunodeficiency virus type 1 (“HIV-1 Tat”) and other Tat proteins, see, e.g., www[dot]lifetein[dot]com/Cell_Penetrating_Peptides[dot]html and Järver (2012) Mol. Therapy—Nucleic Acids, 1:e27, 1-17); octa-arginine or nona-arginine; poly-homoarginine (see Unnamalai et al. (2004) FEBS Letters, 566:307-310); see also the database of cell-penetrating peptides CPPsite 2.0 publicly available at crdd[dot]osdd[dot]net/raghava/cppsite/

[0172] (h) RNase inhibitors;

[0173] (i) cationic branched or linear polymers such as chitosan, poly-lysine, DEAE-dextran, polyvinylpyrrolidone (“PVP”), or polyethylenimine (“PEI”, e.g., PEI, branched, MW 25,000, CAS #9002-98-6; PEI, linear, MW 5000, CAS #9002-98-6; PEI linear, MW 2500, CAS #9002-98-6);

[0174] (j) dendrimers (see, e.g., U.S. Patent Application Publication 2011/0093982, incorporated herein by reference in its entirety);

[0175] (k) counter-ions, amines or polyamines (e.g., spermine, spermidine, putrescine), osmolytes, buffers, and salts (e.g., calcium phosphate, ammonium phosphate);

[0176] (l) polynucleotides (e.g., non-specific double-stranded DNA, salmon sperm DNA);

[0177] (m) transfection agents (e.g., Lipofectin®, Lipofectamine®, and Oligofectamine®, and Invivofectamine® (all from Thermo Fisher Scientific, Waltham, Mass.), PepFect (see Ezzat et al. (2011) Nucleic Acids Res., 39:5284-5298), Transit® transfection reagents (Minis Bio, LLC, Madison, Wis.), and poly-lysine, poly-homoarginine, and poly-arginine molecules including octa-arginine and nona-arginine as described in Lu et al. (2010) J Agric. Food Chem., 58:2288-2294);

[0178] (n) antibiotics, including non-specific DNA double-strand-break-inducing agents (e.g., phleomycin, bleomycin, talisomycin); and

[0179] (o) antioxidants (e.g., glutathione, dithiothreitol, ascorbate).

[0180] In embodiments, the chemical agent is provided simultaneously with the genome editing reagent. In embodiments, the genome editing reagent is covalently or non-covalently linked or complexed with one or more chemical agent; for example, a polynucleotide genome editing reagent can be covalently linked to a peptide or protein (e.g., a cell-penetrating peptide or a pore-forming peptide) or non-covalently complexed with cationic lipids, polycations (e.g., polyamines), or cationic polymers (e.g., PEI). In embodiments, the genome editing reagent is complexed with one or more chemical agents to form, e.g., a solution, liposome, micelle, emulsion, reverse emulsion, suspension, colloid, or gel.

[0181] In embodiments, the physical agent is at least one selected from the group consisting of particles or nanoparticles (e.g., particles or nanoparticles made of materials such as carbon, silicon, silicon carbide, gold, tungsten, polymers, or ceramics) in various size ranges and shapes, magnetic particles or nanoparticles (e.g., silenceMag Magnetotransfection™ agent, OZ Biosciences, San Diego, Calif.), abrasive or scarifying agents, needles or microneedles, matrices, and grids. In embodiments, particulates and nanoparticulates are useful in delivery of the polynucleotide composition or the nuclease or both. Useful particulates and nanoparticles include those made of metals (e.g., gold, silver, tungsten, iron, cerium), ceramics (e.g., aluminum oxide, silicon carbide, silicon nitride, tungsten carbide), polymers (e.g., polystyrene, polydiacetylene, and poly(3,4-ethylenedioxythiophene) hydrate), semiconductors (e.g., quantum dots), silicon (e.g., silicon carbide), carbon (e.g., graphite, graphene, graphene oxide, or carbon nanosheets, nanocomplexes, or nanotubes), and composites (e.g., polyvinylcarbazole/graphene, polystyrene/graphene, platinum/graphene, palladium/graphene nanocomposites). In embodiments, such particulates and nanoparticulates are further covalently or non-covalently functionalized, or further include modifiers or cross-linked materials such as polymers (e.g., linear or branched polyethylenimine, poly-lysine), polynucleotides (e.g., DNA or RNA), polysaccharides, lipids, polyglycols (e.g., polyethylene glycol, thiolated polyethylene glycol), polypeptides or proteins, and detectable labels (e.g., a fluorophore, an antigen, an antibody, or a quantum dot). In various embodiments, such particulates and nanoparticles are neutral, or carry a positive charge, or carry a negative charge. Embodiments of compositions including particulates include those formulated, e.g., as liquids, colloids, dispersions, suspensions, aerosols, gels, and solids. Embodiments include nanoparticles affixed to a surface or support, e.g., an array of carbon nanotubes vertically aligned on a silicon or copper wafer substrate. Embodiments include polynucleotide compositions including particulates (e.g., gold or tungsten or magnetic particles) delivered by a Biolistic-type technique or with magnetic force. The size of the particles used in Biolistics is generally in the “microparticle” range, for example, gold microcarriers in the 0.6, 1.0, and 1.6 micrometer size ranges (see, e.g., instruction manual for the Helios® Gene Gun System, Bio-Rad, Hercules, Calif.; Randolph-Anderson et al. (2015) “Sub-micron gold particles are superior to larger particles for efficient Biolistic® transformation of organelles and some cell types”, Bio-Rad US/EG Bulletin 2015), but successful Biolistics delivery using larger (40 nanometer) nanoparticles has been reported in cultured animal cells; see O'Brian and Lummis (2011) BMC Biotechnol., 11:66-71. Other embodiments of useful particulates are nanoparticles, which are generally in the nanometer (nm) size range or less than 1 micrometer, e.g., with a diameter of less than about 1 nm, less than about 3 nm, less than about 5 nm, less than about 10 nm, less than about 20 nm, less than about 40 nm, less than about 60 nm, less than about 80 nm, and less than about 100 nm. Specific, non-limiting embodiments of nanoparticles commercially available (all from Sigma-Aldrich Corp., St. Louis, Mo.) include gold nanoparticles with diameters of 5, 10, or 15 nm; silver nanoparticles with particle sizes of 10, 20, 40, 60, or 100 nm; palladium “nanopowder” of less than 25 nm particle size; single-, double-, and multi-walled carbon nanotubes, e.g., with diameters of 0.7-1.1, 1.3-2.3, 0.7-0.9, or 0.7-1.3 nm, or with nanotube bundle dimensions of 2-10 nm by 1-5 micrometers, 6-9 nm by 5 micrometers, 7-15 nm by 0.5-10 micrometers, 7-12 nm by 0.5-10 micrometers, 110-170 nm by 5-9 micrometers, 6-13 nm by 2.5-20 micrometers. Embodiments include genome editing reagent-containing compositions including materials such as gold, silicon, cerium, or carbon, e.g., gold or gold-coated nanoparticles, silicon carbide whiskers, carborundum, porous silica nanoparticles, gelatin/silica nanoparticles, nanoceria or cerium oxide nanoparticles (CNPs), carbon nanotubes (CNTs) such as single-, double-, or multi-walled carbon nanotubes and their chemically functionalized versions (e.g., carbon nanotubes functionalized with amide, amino, carboxylic acid, sulfonic acid, or polyethylene glycol moieties), and graphene or graphene oxide or graphene complexes; see, for example, Wong et al. (2016) Nano Lett., 16:1161-1172; Giraldo et al. (2014) Nature Materials, 13:400-409; Shen et al. (2012) Theranostics, 2:283-294; Kim et al. (2011) Bioconjugate Chem., 22:2558-2567; Wang et al. (2010) J Am. Chem. Soc. Comm., 132:9274-9276; Zhao et al. (2016) Nanoscale Res. Lett., 11:195-203; and Choi et al. (2016) J. Controlled Release, 235:222-235. See also, for example, the various types of particles and nanoparticles, their preparation, and methods for their use, e.g., in delivering polynucleotides and polypeptides to cells, disclosed in U.S. Patent Application Publications 2010/0311168, 2012/0023619, 2012/0244569, 2013/0145488, 2013/0185823, 2014/0096284, 2015/0040268, 2015/0047074, and 2015/0208663, all of which are incorporated herein by reference in their entirety.

[0182] In embodiments, a genome editing reagent is delivered to plant cells or plant protoplasts prepared or obtained from a plant, plant part, or plant tissue that has been treated with the polynucleotide compositions (and optionally the nuclease). In embodiments, one or more one chemical, enzymatic, or physical agent, separately or in combination with the genome editing reagent, is provided/applied at a location in the plant or plant part other than the plant location, part, or tissue from which the plant cell or plant protoplast is obtained or isolated. In embodiments, the genome editing reagent is applied to adjacent or distal cells or tissues and is transported (e.g., through the vascular system or by cell-to-cell movement) to the meristem from which plant cells or plant protoplasts are subsequently isolated. In embodiments, a genome editing reagent-containing composition is applied by soaking a seed or seed fragment or zygotic or somatic embryo in the genome editing reagent-containing composition, whereby the genome editing reagent is delivered to the seed or seed fragment or zygotic or somatic embryo from which plant cells or plant protoplasts are subsequently isolated. In embodiments, a flower bud or shoot tip is contacted with a genome editing reagent-containing composition, whereby the genome editing reagent is delivered to cells in the flower bud or shoot tip from which plant cells or plant protoplasts are subsequently isolated. In embodiments, a genome editing reagent-containing composition is applied to the surface of a plant or of a part of a plant (e.g., a leaf surface), whereby the genome editing reagent is delivered to tissues of the plant from which plant cells or plant protoplasts are subsequently isolated. In embodiments a whole plant or plant tissue is subjected to particle- or nanoparticle-mediated delivery (e.g., Biolistics or carbon nanotube or nanoparticle delivery) of a genome editing reagent-containing composition, whereby the genome editing reagent is delivered to cells or tissues from which plant cells or plant protoplasts are subsequently isolated.

### EXAMPLES

### Example 1

[0183] This example illustrates techniques for identifying trans-activating CRISPR (tracrRNA) sequences that are useful in compositions and methods of the invention. More specifically, this example provides examples of Cas12a tracrRNA sequences identified from Lachnospiraceae bacterium ND2006 (“Lb”) and Acidaminococcus sp. BV3L6 (“As”).

[0184] Steps for identifying tracrRNA sequences have been described, e.g., in U.S. Pat. No. 9,790,490, incorporated here by reference: “Identification of tracr sequences may relate to the following steps: Search for the direct repeats or tracr mate sequences in a database to identify a CRISPR region comprising a CRISPR enzyme. Search for homologous sequences in the CRISPR region flanking the CRISPR enzyme in both the sense and antisense directions. Look for transcriptional terminators and secondary structures. Identify any sequence that is not a direct repeat or a tracr mate sequence but has more than 50% identity to the direct repeat or tracr mate sequence as a potential tracr sequence. Take the potential tracr sequence and analyze for transcriptional terminator sequences associated therewith.” RNA sequencing can be used to further characterize such sequences identified as potential or putative tracrRNAs.

[0185] Similar techniques are used to identify putative tracrRNA sequences for Cas12a (Cpf1) nucleases from Lachnospiraceae bacterium ND2006 (“Lb”) and Acidaminococcus sp. BV3L6 (“As”). The techniques employed include: identifying sequences that are located in the CRISPR region flanking the DNA encoding the CRISPR nuclease and that have a nucleotide sequence that permits the transcribed tracrRNA to hybridize to the crRNA (i.e., the transcribed tracrRNA has sufficient complementarity to a crRNA sequence to hybridize to the crRNA), and searching for the presence of a predicted transcriptional terminator in direction of transcription. Sequences having at least 50% sequence identity to the direct repeat in a corresponding CRISPR array are identified as potential tracrRNA sequences; sequences having slightly less than 50% sequence identity to the direct repeat are also evaluated. In this non-limiting example, putative tracrRNA sequences are identified having lengths of between 65 to 84 nucleotides and between 50.0% to 52.8% sequence identity to the direct repeat.

[0186] FIG. 1 illustrates schematics of the Lachnospiraceae bacterium ND2006 Cas12a (“LbCpf1”) CRISPR locus and putative tracrRNA location; the schematics are shown with (upper figure) and without (lower figure) the Cas4 and Cas2 components of the locus. FIG. 2 illustrates a segment of the LbCpf1 CRISPR locus, showing the arrangement in a CRISPR array of the LbCpf1 direct repeats (“DR”, in bold font) flanking a spacer sequence (“spacer”, in underlined font), and illustrating the predicted crRNA processing from this CRISPR array. The following are identified as putative tracrRNA sequences: LbCpf1 putative tracrRNA 1 (84 nucleotides) having the RNA sequence of SEQ ID NO:1 encoded by the DNA sequence of SEQ ID NO:2, and LbCpf1 putative tracrRNA 2 (65 nucleotides) having the RNA sequence of SEQ ID NO:3 encoded by the DNA sequence of SEQ ID NO:4. FIG. 3 illustrates the alignments of the reverse complement of the LbCpf1 direct repeat (DR) sequence, SEQ ID NO:5, with the LbCpf1 putative tracrRNA 1 (SEQ ID NO:2) (top, showing 52.8% identity between the two sequences) and the LbCpf1 putative tracrRNA 2 (SEQ ID NO:4) (bottom, showing 50.0% identity between the two sequences).

[0187] FIG. 4 illustrates schematics of the Acidaminococcus sp. BV3L6 (“As”) Cas12a (“AsCpf1”) CRISPR locus and putative tracrRNA location; the schematics are shown with (upper figure) and without (lower figure) the Cas 1, Cas2, and Cas4 components of the locus. FIG. 5 illustrates a segment of the AsCpf1 CRISPR locus, showing the arrangement in a CRISPR array of the AsCpf1 direct repeats (“DR”, in bold font) flanking a spacer sequence (“spacer”, in underlined font), and illustrating the predicted crRNA processing from this CRISPR array. A putative AsCpf1 tracrRNA (72 nucleotides) is identified as having the RNA sequence of SEQ ID NO:6 encoded by the DNA sequence of SEQ ID NO:7. FIG. 6 illustrates the alignment of the reverse complement of the AsCpf1 direct repeat (DR) sequence, SEQ ID NO:8, with the AsCpf1putative tracrRNA (SEQ ID NO:7), showing 51.4% identity between the two sequences.

### Example 2

[0188] This example describes identification of restriction endonuclease recognition and cleavage sites in and adjacent to Cas12a tracrRNA sequences. It is understood that the recognition site to which restriction endonuclease binds may also be where cleavage occurs, or may be a short distance from where cleavage occurs.

[0189] Recognition and cleavage sites for commercially available restriction endonucleases are identified in the Lachnospiraceae bacterium ND2006 (“Lb”) and Acidaminococcus sp. BV3L6 (“As”) Cas12a loci, specifically in the region of the putative tracrRNA sequences described in Example 1. Table 1 lists restriction endonuclease sites located in or adjacent to (3′ to) the DNA encoding the LbCpf1 putative tracrRNA 2 (65 nucleotides) (see Example 1); FIG. 7 schematically illustrates the position (not to scale) of some of the restriction endonuclease sites within the Lb Cas12a locus.

TABLE 1

| | Recognition | Recognition | Endonuclease cleavage |
|---|---|---|---|
| Restriction | pattern for | pattern | location, relative to |
| endonuclease | endonuclease | SEQ ID | the 5′ terminus of the |
| name | binding | NO: | Lb tracrRNA 2 sequence |
| HphI | GGTGA(8/7) | 183 | 67 |
| AsuHPI | GGTGA(8/7) | 184 | 67 |
| MmeI | TCCRAC(20/18) | 185 | 69 |

[0190] Table 2 lists restriction endonuclease sites located in or adjacent to (3′ to) the DNA encoding the AsCpf1 putative tracrRNA (72 nucleotides) (see Example 1); FIG. 8 schematically illustrates the position (not to scale) of some of the restriction endonuclease sites within the As Cas12a locus.

TABLE 2

| | Recognition | Recognition | Endonuclease cleavage |
|---|---|---|---|
| | pattern for | pattern | location, relative to |
| Restriction | endonuclease | SEQ ID | the 5′ terminus of the |
| endonuclease name | binding | NO: | As tracrRNA sequence |
| AgsI | TTS\hat{ }AA | 186 | 86 |
| MwoI, BstMWI, HpyF10VI | GCNNNNN\hat{ }NNGC | 187 | 113 |
| Hin6I, HinP1I, HspAI | G\hat{ }CGC | 188 | 105 |
| HhaI, AspLEI, BstHHI, CfoI | GCG\hat{ }C | 189 | 107 |
| GlaI | GC\hat{ }GC | 190 | 106 |
| AcyI, BsaHI, BssNI, BstACI, | GR\hat{ }CGYC | 191 | 105 |
| Hin1I, Hsp92I | | | |
| HaeII, BfoI, BstH2I | RGCGC\hat{ }Y | 192 | 108 |
| NlaIV, BmiI, BspLI, PspN4I | GGN\hat{ }NCC | 193 | 106 |
| KasI, SspDI | G\hat{ }GCGCC | 194 | 104 |
| NarI, Mly113I | GG\hat{ }CGCC | 195 | 105 |
| PluTI | GGCGC\hat{ }C | 196 | 108 |
| DinI, EgeI, EheI, SfoI | GGC\hat{ }GCC | 197 | 106 |
| AccB1I, BanI, BshNI, BspT107I | G\hat{ }GYRCC | 198 | 104 |
| EcoT22I, Mph1103I, NsiI, Zsp2I | ATGCA\hat{ }T | 199 | 118 |
| BsmI, Mva12691, PctI | GAATGC(1/-1) | 200 | 116 |
| MslI, RseI, SmiMI | CAYNN\hat{ }NNRTG | 201 | 121 |
| TspDTI | ATGAA(11/9) | 202 | 109 |
| NdeI, FauNDI | CA\hat{ }TATG | 203 | 122 |

### Example 3

[0191] This example illustrates non-limiting embodiments of the polynucleotides and ribonucleoproteins useful in carrying out methods of the invention.

[0192] FIG. 9A schematically depicts an expression cassette for expressing a Cas12a nuclease, including a promoter, coding sequence for the Cas12a nuclease, and a terminator. This non-limiting example illustrates a typical bacterial expression vector, wherein the promoter is a T7 promoter, the Cas12a nuclease is a fusion protein including LbCas12a or AsCas12a and at least one copy of a nuclear localization signal (NLS). This T7 expression system can be expressed and purified from E. coli. This or similar expression cassettes are useful, e.g., for expressing a Cas12a nuclease, with one or multiple copies of nuclear localization signal (NLS) for nuclear targeting located at the nuclease's N-terminus or C-terminus or both. The Cas12a nuclease may then be supplied as a protein and assembled with a guide RNA to form a ribonucleoprotein in vitro before delivery into cells.

[0193] FIG. 9B (left) schematically depicts a DNA expression system including: (a) DNA sequence for a first promoter; (b) operably linked and heterologous to the first promoter, a DNA sequence encoding a first RNA molecule including a Cas12a tracrRNA (here labelled “putative tracrRNA”) and including a restriction endonuclease cleavage site (not specifically indicated) that is suitable for insertion of a sequence coding for a functional RNA moiety; and (c) operably linked and heterologous to the first promoter (and to the optional second promoter, if present), a DNA encoding a Cas12a crRNA (which includes a direct repeat, “DR” and a spacer sequence) that includes a 3′ extension capable of hybridizing with a segment of the first RNA molecule. FIG. 9B (right) schematically depicts an alternative design wherein the DNA expression system includes a DNA encoding a Cas12a crRNA including multiple guide RNAs (i.e., multiple direct repeats and multiple spacer sequences), and including a 3′ extension capable of hybridizing with a segment of the first RNA molecule. Optional elements that can be used in this system include a DNA sequence for a second promoter, which can be positioned between the DNA sequence encoding a first RNA molecule including a Cas12a tracrRNA and the DNA encoding a Cas12a crRNA; and a terminator, which can be positioned 3′ to the DNA encoding a Cas12a crRNA. The 3′-most direct repeat is also optional. This or similar expression systems using e.g., a phage polymerase promoter (such as an SP6, T7, or T3 promoter) permit the tracrRNA and a guide RNA (the Cas12a crRNA) to be transcribed in vitro, together.

[0194] FIG. 9C (left) schematically depicts a non-limiting example of a DNA expression system including: (a) DNA sequence for a first promoter; and (b) operably linked and heterologous to the first promoter, a DNA sequence encoding a first RNA molecule including a Cas12a tracrRNA (here labelled “putative tracrRNA”) and including a restriction endonuclease cleavage site (not specifically indicated) that is suitable for insertion of a sequence coding for a functional RNA moiety. (A similar expression system can also be used for expressing a DNA sequence encoding a functional RNA molecule including a Cas12a tracrRNA and a functional RNA moiety.) FIG. 9C (right) further schematically depicts an expression construct for expressing a guide RNA (here, a Cas12a crRNA including a direct repeat, “DR”, and a spacer sequence); the 3′-most direct repeat is optional. These or similar expression systems using e.g., a phage polymerase promoter (such as an SP6, T7, or T3 promoter) permit the tracrRNA and a guide RNA (the Cas12a crRNA) to be transcribed in vitro, separately.

[0195] FIG. 10 (top) schematically depicts a DNA expression system including: (a) DNA sequence for a first promoter (here, an RNA polymerase II promoter, such as a maize ubiquitin promoter); (b) operably linked and heterologous to the first promoter, DNA encoding a Cas12a nuclease (here, a fusion protein including LbCas12a or AsCas12a and at least one copy of a nuclear localization signal (NLS)); (c) a pol II terminator; (d) a second promoter (e.g., a pol II or pol III promoter, such as a rice U6 or U3 promoter); (e) operably linked and heterologous to the second promoter, a DNA sequence encoding a functional RNA molecule including a Cas12a tracrRNA (here labelled “putative tracrRNA”) and a functional RNA moiety (not specifically indicated); (f) an optional third promoter; (g) operably linked and heterologous to the second promoter (and to the optional third promoter, if present), a DNA encoding a guide RNA including a Cas12a crRNA (which includes a direct repeat, “DR” and a spacer sequence) that includes a 3′ extension capable of hybridizing with a segment of the functional RNA molecule; and (h) a second terminator; the 3′-most direct repeat is optional. FIG. 10 (bottom) schematically depicts a second DNA expression system similar to that shown in FIG. 10 (top), except that the guide RNA includes multiple guide RNAs (i.e., multiple direct repeats and multiple spacer sequences), and including a 3′ extension capable of hybridizing with a segment of the first RNA molecule; the 3′-most direct repeat is optional. It will be apparent that multiple guide RNAs can alternatively be expressed under the control of multiple promoters. One of skill in the art will appreciate that similar constructs include many of the elements shown in FIG. 10 can be designed for expression of a tracrRNA and a crRNA under either one promoter or two promoters, and that promoters are selected for the type of organism (for example, a dicot plant rather than a monocot plant), tissue, or cell where the encoded nuclease and/or RNAs are to be expressed. Any of these DNA expression systems is conveniently provided on a single plasmid. While FIG. 10 depicts the component expression cassettes orientated in the same direction, it is understood that these can be orientated in opposite directions.

### Example 4

[0196] This example describes a DNA expression system including: (a) DNA sequence for a first promoter; and (b) operably linked and heterologous to the first promoter, a DNA sequence encoding a functional RNA molecule including a Cas12a tracrRNA and a functional RNA moiety. This example illustrates employing a Cas12a tracrRNA as a scaffold or carrier for a functional RNA moiety (in this case, multiple copies of an aptamer capable of recruiting regulatory proteins as well as RNA for annealing to the crRNA 3′ extension), allowing the functional RNA moiety to be incorporated into a Cas12a ribonucleoprotein complex. More specifically, this example illustrates a Cas12a ribonucleoprotein complex including a deactivated Cas12a nuclease, a guide RNA (a Cas12a crRNA having a 3′ extension) targeting the promoter region of the maize (Zea mays) Lc gene, and a functional RNA molecule provided by integrating multiple copies of an MS2 aptamer as well as sequence for annealing to the crRNA 3′ extension into a Cas12a tracr.

[0197] A ternary system is constructed containing a deactivated Cas12a nuclease, a guide RNA (a Cas12a crRNA having a 3′ extension) targeting the promoter region of the maize (Zea mays) Lc gene, and a functional RNA molecule provided by integrating multiple copies of an MS2 aptamer and sequence for hybridizing to the crRNA 3′ extension into a Cas12a tracr. FIG. 11 (top) schematically depicts construction of the DNA encoding the functional RNA molecule by cleavage at an HphI restriction endonuclease cleavage site (see Example 2 and Table 1) in or adjacent to a tracrRNA identified from the native Lachnospiraceae bacterium ND2006 CRISPR Cas12a locus (see Example 1), insertion of DNA encoding multiple copies of an MS2 aptamer as well as sequence for annealing to the crRNA 3′ extension, and ligation to form the DNA encoding the functional RNA molecule, which can be complexed with the Cas12a nuclease to form the ribonucleoprotein depicted in FIG. 11 (bottom). A similar approach is useful for providing functional RNA molecules including a Cas12a tracrRNA and a functional RNA moiety, wherein the functional RNA moiety is one or more RNAs selected from the group consisting of (a) an RNA sequence for annealing to a donor polynucleotide; (b) an RNA sequence for annealing to the crRNA 3′ extension; (c) a terminator sequence; (d) an RNA aptamer; (e) a ribozyme; (f) a detectable label; (g) a bar-coding sequence and (h) an RNA sequence forming at least partially double-stranded RNA, for example, RNA forming at least partially double-stranded RNA capable of silencing a gene (e.g., RNA that forms one or more stem-loops where the stem includes double-stranded RNA of at least about 18 base-pairs designed to silence a target gene, or RNA that has the secondary structure of a microRNA precursor and is processed to a mature microRNA designed to silence a target gene). For example, similar approaches are used for providing a functional RNA molecule that includes aptamers engineered to target endogenous proteins, such as transcriptional cofactors.

[0198] The DNA encoding the predicted tracrRNA identified from the native Lachnospiraceae bacterium ND2006 CRISPR Cas12a locus has the sequence

(SEQ ID NO: 9)
AATTGCAAATCTTTGAAATAATGCAGACTTAAATTTATAAATTCATGGA
ATAAGGTGATTTTATTGTGAAAAAATACTCGTATTTTGTTGGAAAAACA
TCTTTTTGTTGTATAATATGATGATATACGG,

where the tracrRNA nucleotides are shown in underlined font, the HphI recognition and binding site located within the tracrRNA is shown in bold font, and nucleotides of the native sequence located between the 3′ end of the predicted tracrRNA and the 5′ end of the CRISPR array are shown in plain font. The DNA encoding the MS2 aptamer stem-loops has the sequence GTTTTAGAGCTAGGCCAACATGAGGATCACCCATGTCTGCAGGGCCTAGCAAGTTAAAATAAG GCTAGTCCGTTATCAACTTGGCCAACATGAGGATCACCCATGTCTGCAGGGCCAAGTGGCACCG AGTCGGTGCTTTTT (SEQ ID NO:10). The deactivated LbCas12a nuclease is encoded by DNA having the sequence of SEQ ID NO:11, which is a D832A mutant of the wild-type Cas12a nuclease having NCBI reference sequence WP_051666128.1 (see www[dot]ncbi[dot]nlm[dot]nih[dot]gov/protein/WP_051666128.1/). In embodiments, the deactivated LbCas12a nuclease optionally includes additional modifications, for example, one or more copies of a nuclear localization signal (NLS), or an affinity tag for later purification of the nuclease, with, if needed, sequences permitting cleavage and removal of the affinity tag. The DNA encoding the Cas12a crRNA with the 3′ extension has the sequence

(SEQ ID NO: 12)
GTTTCAAAGATTAAATAATTTCTACTAAGTGTAGAT
TGGACAGAGCTCCAAGTGACCAAAACCGTATATCAT,

where the direct repeat is shown in underlined font, the spacer targeting the promoter region of the maize (Zea mays) B104 Lc gene is shown in bold font, and the 3′ extension is shown in plain font. The DNA targeted for editing is the maize (Zea mays) Lc gene, specifically the Zm-Lc promoter region having the sequence

(SEQ ID NO: 13)
ATAGAGAGAGAAGAGGGGTCGTGTAGTAGTGCTTAAACTGTACATGAAC
AGCAGTAGTGTTACAGAAGCTAAACTCAACCAGAGCTCCACCAAAGACA
AAGAGGGTCTACTTCCATCACCGTCTTGCTCGGTCACTTGGAGCTCTGT
CCATAAATTAAACCCATCGTGGCATATCTGTAGGCATCTACCCCGTCTT
CGTCGTCCGTTCCTCACTAGCTACCAAGAGGTCGCCATTATTGCCAACA
TAGAGTGTACGTGGATGTCTATATATATGCCTACTTGCACCCATATGGC
ATAGGCGTTCGATCCCCTTAGCGCGGAGGAGAGCTCCTCCGGTTCTTCT
CTACCCTTCGCATGGAAGTTCTTGCATTGCTTCGTTGCTTCTCTAGTTT
CTTCCTTCTACGTCTTTCCAGCATACGCATGCCCCTCGTCCGCCGGTTC
ACGAGGCATCGTCTGATGATCAGTAGATAATAAGCAATATAATACTGAT
CTAGAATCGAGTTGTTGTACTCTTCGCAGATAGGTTCGTTCCTTCACAT
AGAAGCGAGTACAGACTACAGACCACACAGTATCAGCTGGCACGAAACG
AAAATGGTTACTTGCAAATTGCATGCACGAGCTAGAATTATATTCTTCT
AATCTTCTTCGTTGACTTTCTGGCTTCAGCAGGCGCGTGAT,

wherein the target sequence that corresponds to the Cas12a crRNA spacer sequence is indicated by bold, underlined font.

[0199] The DNA encoding the Lachnospiraceae bacterium ND2006 Cas12a tracrRNA sequence (SEQ ID NO:9) contained within a plasmid vector is cleaved with HphI or by another compatible restriction endonuclease (see Table 1, Example 2) and the DNA encoding the MS2 RNA-binding stem-loops (SEQ ID NO:10) is inserted by ligation to provide DNA encoding the functional RNA molecule (FIG. 11, top); alternatively, the DNA encoding the MS2 RNA-binding stem-loops (SEQ ID NO:10) is inserted into the DNA encoding the Cas12a tracrRNA through another molecular cloning method. This functional RNA molecule is transcribed in vitro and purified. A Cas12a crRNA (SEQ ID NO:12) containing a 3′ extension of 10 ribonucleotides complementary to the 3′ sequence of the Cas12a tracrRNA is similarly transcribed and purified. The two RNA molecules are mixed with deactivated LbCas12a nuclease (SEQ ID NO:11) in 10:1 molar excess in 50 millimolar HEPES buffer (300 millimolar NaCl, 1 millimolar MgCl2) at room temperature for 20 minutes to provide the ternary ribonucleoprotein for use in modifying the Lc promoter. Ternary RNPs are delivered to maize B104 protoplasts using PEG-mediated transformation. An MS2-tagged transcriptional regulator is co-transfected for multi-copy recruitment to the targeted locus, which is predicted to result in a change in expression of the maize Lc gene. An example of a suitable MS2-tagged transcriptional regulator sequence is an MS2-P65-HSF1 fusion of multiple transcriptional activators (P65 and HSF1) having the sequence of SEQ ID NO:14, which includes an MS2 region (nucleotides 1-390), a nuclear localization signal (NLS) (nucleotides 445-465), a PG5 region (nucleotides 481-1023), and an HSF1 region (nucleotides 1047-1419). In an alternative embodiment, the viral protein-derived transcriptional activator, VP64, with the sequence of SEQ ID NO:15, can be similarly tagged with the MS2 sequence and used to activate transcription of the maize Lc gene.

### Example 5

[0200] This example illustrates non-limiting embodiments of DNA expression systems that include DNA sequence for a first promoter; and, operably linked and heterologous to the first promoter, a DNA sequence encoding either: (1) a first RNA molecule comprising a Cas12a tracrRNA and comprising a restriction endonuclease cleavage site that is suitable for insertion of a sequence coding for a functional RNA moiety, or (2) a functional RNA molecule comprising a Cas12a tracrRNA and a functional RNA moiety.

[0201] In an embodiment, the DNA expression system includes: (a) DNA sequence for a first promoter; and, operably linked and heterologous to the first promoter; (b) a DNA sequence encoding a first RNA molecule comprising a Cas12a tracrRNA and comprising a restriction endonuclease cleavage site that is suitable for insertion of a sequence coding for a functional RNA moiety; and (c) optionally, a terminator. In embodiments, the DNA expression system further comprises: (d) optionally, a DNA sequence for a second promoter; (e) operably linked and heterologous to the first promoter or the second promoter, a DNA encoding a Cas12a crRNA that comprises a 3′ extension capable of hybridizing with a segment of the first RNA molecule; and (f) optionally, a terminator. In embodiments of such a DNA expression system, the Cas12a crRNA is capable of complexing with a Cas12a nuclease to form a Cas12a ribonucleoprotein complex. The DNA sequence encoding the first promoter and/or the optional second promoter and or the optional terminator(s) is selected according to the biological system of interest (e.g., for expression in a bacterial cell, a yeast cell, an animal cell, or a plant cell). Non-limiting examples of promoters useful in such DNA expression systems include Pol II promoters and Pol III promoters. Non-limiting examples of promoters useful in the DNA expression systems and engineered systems of this disclosure include promoters functional in prokaryotic cells (e.g., useful for in vitro transcription), such as, but not limited to, promoters from T7 bacteriophage (T7), T7 bacteriophage plus lac operators (T7lac), Sp6 bacteriophage (Sp6, used with SP6 RNA polymerase), arabinose metabolic operon (araBAD), E. coli tryptophan operator (trp), lac operon (lac), bacteriophage lambda (pL), and a hybrid promoter of lac and trp (Ptac). Non-limiting examples of promoters useful especially in animal cells include promoters from β-actin (ACTB), cytomegalovirus (CMV), elongation factor-1α, (EF1α), phosphoglycerate kinase (PGK1), ubiquitin C (UbC), herpes simplex virus thymidine kinase (HSV-1 TK), early and late simian vacuolating virus 40 (SV40), long terminal repeats (LTRs) from retrovirus, mouse metallothionein-I, Drosophila actin 5c, baculovirus polyhedron, yeast transcription elongation factor (TEF1), alcohol dehydrogenase I (ADH1), glyceraldehyde 3-phosphate dehydrogenase (GAPDH), human polymerase III RNA promoter (H1), human U6 small nuclear promoter (U6), an inducible tetracycline response element promoter, and a CAG hybrid (containing a CMV enhancer, chicken beta actin promoter, and rabbit beta-globin splice acceptor); many other promoters useful in animals, including in humans (e.g., for gene therapeutic applications) are available in the art, see, e.g., Zheng and Baum (2008) Methods Mol. Biol., 434:205-219 (available at doi:10.1007/978-1-60327-248-3_13). Non-limiting examples of promoters useful in such DNA expression systems especially in plant cells include a nopaline synthase (Nos) promoter and a ubiquitin promoter; specific examples include a promoter selected from the group consisting of a TaU3 promoter (SEQ ID NO:16), a Nos promoter (SEQ ID NO:17), a ZmUBI1 promoter (SEQ ID NO:18), and a SlUBI10 promoter (SEQ ID NO:19). Further non-limiting examples of promoters especially useful in plant cells include SEQ ID NOs:20-71; see Table 3. Specific embodiments include a DNA expression system wherein the first promoter has a DNA sequence selected from the group consisting of SEQ ID NOs:16-71, and the Cas12a tracrRNA has the sequence of SEQ ID NOs:1, 3, 6, 139-146, 149-169, 223-240, and 241. Specific embodiments include a DNA expression system having the optional second promoter, wherein the second promoter has a DNA sequence selected from the group consisting of SEQ ID NOs:16-71. In embodiments, the first promoter and optional second promoter have different sequences; in other embodiments, the first promoter and optional second promoter have identical sequences. In embodiments, the Cas12a crRNA is capable of complexing with a Cas12a nuclease to form a Cas12a ribonucleoprotein complex; in embodiments, the Cas12a nuclease is (a) a Cas12a nuclease identified from the genome of a bacterial species selected from the group consisting of Francisella tularensis 1, Prevotella albensis, Lachnospiraceae bacterium MC2017 1, Butyrivibrio proteoclasticus, Peregrinibacteria bacterium GW2011GWA2_33_10, Parcubacteria bacterium GW2011_GWC2_44_17, Smithella sp. SCADC, Acidaminococcus sp. BV3L6, Lachnospiraceae bacterium MA2020, Candidatus Methanoplasma termitum, Eubacterium eligens, Moraxella bovoculi 237, Leptospira inadai, Lachnospiraceae bacterium ND2006, Porphyromonas crevioricanis 3, Prevotella disiens and Porphyromonas macacae; or (b) a Cas12a nuclease selected from the group consisting of LbCas12a, AsCas12a, FnCas12a, and a deactivated Cas12a nuclease; or (c) a Cas12a nuclease having at least 80% sequence identity with a sequence selected from the group consisting of SEQ ID NOs:11, 107-138, 172, 204-221, and 222; or (d) a Cas12a nuclease variant selected from the group consisting of (1) a variant LbCpf1 that differs from a wild-type LbCpf1 sequence (SEQ ID NO:135) in containing at least one point mutation selected from the group consisting of G309P, Y312F, M4741, D523N, Q531K, C930A, D937N, V954F/Q, M975L, A984E, I994L, T1006K, I1014V, V1055N/D, L1065F/Y, Y1180F, V1209G, I1229L, V801I, Y802I, D850A, E943A, and D1198A; (2) a variant AsCpf1 that differs from a wild-type AsCpf1 sequence (SEQ ID NO:134) in containing at least one point mutation selected from the group consisting of L320P, V980A, Q987N, T1004F/Q, K1035E, T1057K, D1107N, F1117Y, N1291L, D908A, E993A, and D1263A; and (3) a variant FnCpf1 that differs from a wild-type FnCpf1 sequence (SEQ ID NO:172) in containing at least one point mutation selected from the group consisting of I339P, L342F, Q588K, F1017Q, K1047E, N1118D, F1128Y, L867I, D917A, E1006A, and D1255A.

[0202] In embodiments, the DNA expression system includes: (a) DNA sequence for a first promoter wherein the first promoter has a DNA sequence selected from the group consisting of SEQ ID NOs:16-71; and, operably linked and heterologous to the first promoter; (b) a DNA sequence encoding a first RNA molecule comprising a Cas12a tracrRNA, wherein the Cas12a tracrRNA has a sequence that is selected from the group consisting of SEQ ID NOs:1, 3, 6, 139-146, 149-169, 223-240, and 241, and that comprises a restriction endonuclease cleavage site that is suitable for insertion of a sequence coding for a functional RNA moiety; and (c) optionally, a terminator, preferably a terminator functional in a eukaryotic cell; in embodiments, the DNA expression system further comprises: (d) optionally, a DNA sequence for a second promoter, e.g., a promoter having a DNA sequence selected from the group consisting of SEQ ID NOs:16-71; (e) operably linked and heterologous to the first promoter or the second promoter, a DNA encoding a Cas12a crRNA that comprises a 3′ extension capable of hybridizing with a segment of the first RNA molecule and that is capable of complexing with a Cas12a nuclease to form a Cas12a ribonucleoprotein complex, wherein the Cas12a nuclease is (a) a Cas12a nuclease identified from the genome of a bacterial species selected from the group consisting of Francisella tularensis 1, Prevotella albensis, Lachnospiraceae bacterium MC2017 1, Butyrivibrio proteoclasticus, Peregrinibacteria bacterium GW2011_GWA2_33_10, Parcubacteria bacterium GW2011_GWC2_44_17, Smithella sp. SCADC, Acidaminococcus sp. BV3L6, Lachnospiraceae bacterium MA2020, Candidatus Methanoplasma termitum, Eubacterium eligens, Moraxella bovoculi 237, Leptospira inadai, Lachnospiraceae bacterium ND2006, Porphyromonas crevioricanis 3, Prevotella disiens and Porphyromonas macacae; or (b) a Cas12a nuclease selected from the group consisting of LbCas12a, AsCas12a, FnCas12a, and a deactivated Cas12a nuclease; or (c) a Cas12a nuclease having at least 80% sequence identity with a sequence selected from the group consisting of SEQ ID NOs:11, 107-138, 172, 204-221, and 222; or (d) a Cas12a nuclease variant selected from the group consisting of (1) a variant LbCpf1 that differs from a wild-type LbCpf1 sequence (SEQ ID NO:135) in containing at least one point mutation selected from the group consisting of G309P, Y312F, M4741, D523N, Q531K, C930A, D937N, V954F/Q, M975L, A984E, I994L, T1006K, I1014V, V1055N/D, L1065F/Y, Y1180F, V1209G, I1229L, V801I, Y802I, D850A, E943A, and D1198A; (2) a variant AsCpf1 that differs from a wild-type AsCpf1 sequence (SEQ ID NO:134) in containing at least one point mutation selected from the group consisting of L320P, V980A, Q987N, T1004F/Q, K1035E, T1057K, D1107N, F1117Y, N1291L, D908A, E993A, and D1263A; and (3) a variant FnCpf1 that differs from a wild-type FnCpf1 sequence (SEQ ID NO:172) in containing at least one point mutation selected from the group consisting of I339P, L342F, Q588K, F1017Q, K1047E, N1118D, F1128Y, L867I, D917A, E1006A, and D1255A; and (f) optionally, a terminator.

[0203] In another embodiment, the DNA expression system includes: (a) DNA sequence for a first promoter; and, operably linked and heterologous to the first promoter, (b) a DNA sequence encoding a functional RNA molecule comprising a Cas12a tracrRNA and a functional RNA moiety. In embodiments, the DNA expression system further comprises: (c) optionally, a DNA sequence for a second promoter; (d) operably linked and heterologous to the first promoter or the second promoter, a DNA encoding a Cas12a crRNA that comprises a 3′ extension capable of hybridizing with a segment of the functional RNA molecule; and (e) optionally, a terminator. In embodiments of such a DNA expression system, the Cas12a crRNA is capable of complexing with a Cas12a nuclease to form a Cas12a ribonucleoprotein complex. The DNA sequence encoding the first promoter is selected according to the biological system of interest (e.g., for expression in a bacterial cell, a yeast cell, an animal cell, or a plant cell). Non-limiting examples of promoters useful in such DNA expression systems include a nopaline synthase (Nos) promoter and a ubiquitin promoter; specific examples include a promoter selected from the group consisting of a TaU3 promoter (SEQ ID NO:16), a Nos promoter (SEQ ID NO:17), a ZmUBI1 promoter (SEQ ID NO:18), and a SlUBI10 promoter (SEQ ID NO:19). Specific embodiments include a DNA expression system wherein the first promoter has a DNA sequence selected from the group consisting of SEQ ID NOs:16-71, and the functional RNA molecule includes a Cas12a tracrRNA that has the sequence of SEQ ID NO:3. Specific embodiments include a DNA expression system wherein the Cas12a crRNA is capable of complexing with a Cas12a nuclease to form a Cas12a ribonucleoprotein complex, wherein the first promoter has a DNA sequence selected from the group consisting of SEQ ID NOs:16-71 or comprises a promoter selected from the group consisting of a U6 promoter, an H1 promoter, a Rous sarcoma virus (RSV) LTR promoter, a cytomegalovirus (CMV) promoter, an SV40 promoter, a dihydrofolate reductase promoter, a beta-actin promoter, a phosphoglycerol kinase (PGK) promoter, and an EF1a promoter and wherein the Cas12a nuclease is (a) a Cas12a nuclease identified from the genome of a bacterial species selected from the group consisting of Francisella tularensis 1, Prevotella albensis, Lachnospiraceae bacterium MC2017 1, Butyrivibrio proteoclasticus, Peregrinibacteria bacterium GW2011_GWA2_33_10, Parcubacteria bacterium GW2011_GWC2_44_17, Smithella sp. SCADC, Acidaminococcus sp. BV3L6, Lachnospiraceae bacterium MA2020, Candidatus Methanoplasma termitum, Eubacterium eligens, Moraxella bovoculi 237, Leptospira inadai, Lachnospiraceae bacterium ND2006, Porphyromonas crevioricanis 3, Prevotella disiens and Porphyromonas macacae; or (b) a Cas12a nuclease selected from the group consisting of LbCas12a, AsCas12a, FnCas12a, and a deactivated Cas12a nuclease; or (c) a Cas12a nuclease having at least 80% sequence identity with a sequence selected from the group consisting of SEQ ID NOs:11, 107-138, 172, 204-221, and 222; or (d) a Cas12a nuclease variant selected from the group consisting of (1) a variant LbCpf1 that differs from a wild-type LbCpf1 sequence (SEQ ID NO:135) in containing at least one point mutation selected from the group consisting of G309P, Y312F, M4741, D523N, Q531K, C930A, D937N, V954F/Q, M975L, A984E, I994L, T1006K, I1014V, V1055N/D, L1065F/Y, Y1180F, V1209G, I1229L, V801I, Y802I, D850A, E943A, and D1198A; (2) a variant AsCpf1 that differs from a wild-type AsCpf1 sequence (SEQ ID NO:134) in containing at least one point mutation selected from the group consisting of L320P, V980A, Q987N, T1004F/Q, K1035E, T1057K, D1107N, F1117Y, N1291L, D908A, E993A, and D1263A; and (3) a variant FnCpf1 that differs from a wild-type FnCpf1 sequence (SEQ ID NO:172) in containing at least one point mutation selected from the group consisting of I339P, L342F, Q588K, F1017Q, K1047E, N1118D, F1128Y, L867I, D917A, E1006A, and D1255A; in some embodiments of such DNA expression systems, the Cas12a tracrRNA has the sequence of SEQ ID NOs:1, 3, 6, 139-146, 149-169, 223-240, and 241.

[0204] Embodiments of these various DNA expression systems further include additional expression elements, e.g., expression enhancing elements (“enhancers”), 3′ untranslated region elements such as terminators or polyadenylation elements, and introns. The DNA sequences encoding the first promoter, optional second promoter, optional terminator, and any other expression element are generally selected according to the biological system of interest (e.g., for expression in a bacterial cell, a yeast cell, an animal cell, or a plant cell). Terminators useful in DNA expression systems and engineered systems of this disclosure include terminators having a sequence selected from the group consisting of SEQ ID NOs:72-100 or comprise a U6 poly-T terminator, an SV40 terminator, an hGH terminator, a BGH terminator, an rbGlob terminator, or a synthetic terminator functional in a eukaryotic cell. Other expression elements useful in DNA expression systems and engineered systems of this disclosure include expression elements having a sequence selected from the group consisting of SEQ ID NOs:101-106.

[0205] Promoters useful in plant cells include promoters especially suited to monocot plants and promoters especially suited to dicot plants. Non-limiting examples of these various expression elements are provided in Table 3 and are useful for heterologous expression of Cas12a tracrRNAs, such as a tracrRNA having an RNA sequence selected from the group consisting of SEQ ID NOs:1, 3, 6, 139-146, 149-169, 223-240, and 241 or the Cas12a tracrRNA sequences disclosed in U.S. Pat. No. 9,790,490 (incorporated herein by reference).

TABLE 3

| | | | | | SEQ |
|---|---|---|---|---|---|
| Designation | Source | Source ID | Application | Type | ID NO: |
| prAtUbi10 | Arabidopsis | AT4G05320.2 | Pol II promoter | dicot | 20 |
| | thaliana | | | | |
| prGmUBI8 | Glycine max | Glyma10g051100 | Pol II promoter | dicot | 21 |
| prGmUBI1 | Glycine max | Glyma10g251900 | Pol II promoter | dicot | 22 |
| prGmUBI9 | Glycine max | Glyma13g138600 | Pol II promoter | dicot | 23 |
| prGmUBI4 | Glycine max | Glyma13g176100 | Pol II promoter | dicot | 24 |
| prGmUBI7 | Glycine max | Glyma17g042100 | Pol II promoter | dicot | 25 |
| enTCUP2 | tobacco | JX155386.1 | Pol II promoter | dicot | 26 |
| prSlUbi10 | Solanum | LOC101258282 | Pol II promoter | dicot | 27 |
| | lycopersicum | | | | |
| prWpUbi10 | White pear | LOC103948134 | Pol II promoter | dicot | 28 |
| prBvUbi10 | Sugar beet | LOC104907074 | Pol II promoter | dicot | 29 |
| prRsUbi10 | Radish | LOC108826774 | Pol II promoter | dicot | 30 |
| prIlUbi10 | Japanese | LOC109190585 | Pol II promoter | dicot | 31 |
| | morning glory | | | | |
| prCuUbi10 | Cucurbita | LOC111802502 | Pol II promoter | dicot | 32 |
| prHaUBI | Helianthus | OTG28215 | Pol II promoter | dicot | 33 |
| | annuus | | | | |
| prLAT52 | tomato | X15855 | Pol II promoter | dicot | 34 |
| prHaUbi1 | Helianthus | X57005.1 | Pol II promoter | dicot | 35 |
| | annuus | | | | |
| prPcUbi4 | Parsley | X64345.1 | Pol II promoter | dicot | 36 |
| SlU6-2 | tomato | | Pol III promoter | dicot | 37 |
| MtU6.6 | Medicago | | Pol III promoter | dicot | 38 |
| | truncatula | | | | |
| GmU6-9.1 | Glycine max | | Pol III promoter | dicot | 39 |
| AtU6 | Arabidopsis | | Pol III promoter | dicot | 40 |
| | thaliana | | | | |
| GmU6-10 | Glycine max | | Pol III promoter | dicot | 41 |
| TC-AtU6 | Arabidopsis | | Pol III promoter | dicot | 42 |
| | thaliana | | | | |
| At7SL | Arabidopsis | | Pol III promoter | dicot | 43 |
| | thaliana | | | | |
| ZmKN1 | Zea mays | AY312169.1 | Pol II promoter | monocot | 44 |
| prOsACT-B | Oryza sativa | CP018159 | Pol II promoter | monocot | 45 |
| prOsACT-A | Oryza sativa | EU155408.1 | Pol II promoter | monocot | 46 |
| PvUBI1 | Panicum | HM209467.1 | Pol II promoter | monocot | 47 |
| | virgatum | | | | |
| prOsUbi2 | Oryza sativa | LOC_Os02g06640 | Pol II promoter | monocot | 48 |
| prOsUbi1 | Oryza sativa | LOC_Os06g46770 | Pol II promoter | monocot | 49 |
| prAtaUbi1 | Aegilops tauschii | LOC109747268 | Pol II promoter | monocot | 50 |
| prPhUbi1 | Panicum hallii | LOC112888620 | Pol II promoter | monocot | 51 |
| prZmADP1 | Zea mays | LOC542430 | Pol II promoter | monocot | 52 |
| prZmEF1alpha | Zea mays | LOC542581 | Pol II promoter | monocot | 53 |
| prZmADP2 | Zea mays | LOC542584 | Pol II promoter | monocot | 54 |
| prZmUBI1 | Zea mays | S94464 | Pol II promoter | monocot | 55 |
| prLPT2-A | Hordeum | X69793 | Pol II promoter | monocot | 56 |
| | vulgare | | | | |
| prLPT2-B | Hordeum | X69793 | Pol II promoter | monocot | 57 |
| | vulgare | | | | |
| prZmFluory2 | Zea mays | ZEAMMB73_Zm00001 | Pol II promoter | monocot | 58 |
| | | d049243 | | | |
| pZMU6- | Zea mays | maize | Pol III promoter | monocot | 59 |
| C1_Short | | | | | |
| pOsU6.1 | Oryza sativa | rice | Pol III promoter | monocot | 60 |
| pOsU6.2 | Oryza sativa | rice | Pol III promoter | monocot | 61 |
| pOsU6.1_short | Oryza sativa | rice | Pol III promoter | monocot | 62 |
| pOsU6.2_short | Oryza sativa | rice | Pol III promoter | monocot | 63 |
| OsU6 | Oryza sativa | | Pol III promoter | monocot | 64 |
| TaU3 | wheat | | Pol III promoter | monocot | 65 |
| prM24 | Mirabilis mosaic | AF454635.1 | Pol II promoter | dicot or | 66 |
| | virus | | | monocot | |
| pr35S | Cauliflower | V00140.1 | Pol II promoter | dicot or | 67 |
| | mosaic virus | | | monocot | |
| prFMV | figwort mosaic | X06166.1 | Pol II promoter | dicot or | 68 |
| | virus | | | monocot | |
| prFMV 34S- | figwort mosaic | X16673.1 | Pol II promoter | dicot or | 69 |
| 1/2x | virus | | | monocot | |
| prNOS | Agrobacterium | | Pol II promoter | dicot or | 70 |
| | | | | monocot | |
| prOCS | Agrobacterium | | Pol II promoter | dicot or | 71 |
| | | | | monocot | |
| tAtUbi10 | Arabidopsis | AT4G05320.2 | Pol II terminator | dicot | 72 |
| | thaliana | | | | |
| tAtADH | Arabidopsis | AY536888 | Pol II terminator | dicot | 73 |
| | thaliana | | | | |
| tNtExt | Nicotiana | D13951 | Pol II terminator | dicot | 74 |
| | tabacum | | | | |
| tHSP 18.2 | Arabidopsis | GeneID: 836093 | Pol II terminator | dicot | 75 |
| | thaliana | | | | |
| tGmUbi1 | Glycine max | Glyma10g251900 | Pol II terminator | dicot | 76 |
| tSlUbi10 | Solanum | LOC101258282 | Pol II terminator | dicot | 77 |
| | lycopersicum | | | | |
| tWpUbi10 | White pear | LOC103948134 | Pol II terminator | dicot | 78 |
| tBvUbi10 | Sugar beet | LOC104907074 | Pol II terminator | dicot | 79 |
| tRsUbi10 | Radish | LOC108826774 | Pol II terminator | dicot | 80 |
| tIlUbi10 | Japanese | LOC109190585 | Pol II terminator | dicot | 81 |
| | morning glory | | | | |
| tCuUbi10 | Cucurbita | LOC111802502 | Pol II terminator | dicot | 82 |
| tHaUBI | Helianthus | OTG28215 | Pol II terminator | dicot | 83 |
| | annuus | | | | |
| tpea E9 | Pisum sativum | X00806 | Pol II terminator | dicot | 84 |
| tpea 3A | Pisum sativum | X04333.1 | Pol II terminator | dicot | 85 |
| tHaUbi1 | Helianthus | X57005.1 | Pol II terminator | dicot | 86 |
| | annuus | | | | |
| tZmKN1 | Zea mays | AY312169.1 | Pol II terminator | monocot | 87 |
| tOsAct1 | Oryza sativa | CP018159 | Pol II terminator | monocot | 88 |
| tOsUbi2 | Oryza sativa | LOC_Os02g06640 | Pol II terminator | monocot | 89 |
| tOsUbi1 | Oryza sativa | LOC_Os06g46770 | Pol II terminator | monocot | 90 |
| tAtaUbi1 | Aegilops tauschii | LOC109747268 | Pol II terminator | monocot | 91 |
| tPhUbi1 | Panicum hallii | LOC112888620 | Pol II terminator | monocot | 92 |
| tZmADP1 | Zea mays | LOC542430 | Pol II terminator | monocot | 93 |
| tZmEF1alpha | Zea mays | LOC542581 | Pol II terminator | monocot | 94 |
| tZmADP2 | Zea mays | LOC542584 | Pol II terminator | monocot | 95 |
| tZmUbi1 | Zea mays | S94464 | Pol II terminator | monocot | 96 |
| tLPT2 | Hordeum | X69793 | Pol II terminator | monocot | 97 |
| | vulgare | | | | |
| tZmFluory2 | Zea mays | ZEAMMB73_Zm00001 | Pol II terminator | monocot | 98 |
| | | d049243 | | | |
| t35S | Cauliflower | V00140.1 | Pol II terminator | dicot or | 99 |
| | mosaic virus | | | monocot | |
| tNOS | Agrobacterium | | Pol II terminator | dicot or | 100 |
| | | | | monocot | |
| TMV | tobacco mosaic | | enhancer | dicot | 101 |
| translational | virus | | | | |
| enhancer | | | | | |
| FMV 34S | figwort mosaic | | enhancer | dicot or | 102 |
| double | virus | | | monocot | |
| enhancer | | | | | |
| FMV34S/CaM | figwort and | | enhancer | dicot or | 103 |
| V35S enhancer | cauliflower | | | monocot | |
| | mosaic | | | | |
| | virus/synthetic | | | | |
| iGmIDH1 | Glycine max | Gene ID: 606295 | intron | dicot | 104 |
| iZmPEPC | Zea mays | LOC542372 | intron | monocot | 105 |
| MALAT1 | mouse | | 3′ end (triple | dicot or | 106 |
| | | | helix) | monocot | |

### Example 6

[0206] This example illustrates non-limiting embodiments of Cas12a nucleases and their corresponding tracrRNA sequences. Table 4 provides the protein sequences of several Cas12a nucleases and the RNA sequence of each nuclease's associated tracrRNA. Table 4 further identifies for each tracrRNA one or more native restriction endonuclease cleavage sites that are suitable, e.g., for insertion of a sequence coding for a functional RNA moiety.

TABLE 4

| | | | | Restriction | Restriction | |
|---|---|---|---|---|---|---|
| | | | | sites within | sites within | |
| | | | | DNA between | DNA | |
| | Protein | Protein | tracrRNA | tracrRNA | encoding | |
| | Accession | SEQ ID | SEQ ID | and | the | Putative |
| Species | Number | NO: | NO: | CRISPR array | tracrRNA | PAM |
| Uncultured | SCH45297.1 | 107 | 139 | SgeI, | DraI | 5′ TTTV |
| Clostridium sp. | | | | HpyCH4III, | | |
| isolate | | | | MfeI, SspI | | |
| 2789STDY5608795 | | | | | | |
| Uncultured | EKE28449.1 | 108 | 140 | AvrII | HphI, | 5′ TTTV |
| bacterium | | | | | HpyAV, | |
| (gcode4) | | | | | | |
| ACD_3C00058, | | | | | | |
| whole genome | | | | | | |
| shotgun sequence | | | | | | |
| Thiomicrospira | WP_068647445.1 | 109 | 141 | AjuI, BceAI, | BseMII, | 5′ TTTV |
| sp. XS5 | | | | HpyCH4III | BspHI | |
| ZB100000 | | | | | | |
| Flavobacterium | WP_014085038.1 | 110 | 142 | BtsI, TspRI, | HindIII, | 5′ TTTV |
| branchiophilum | | | | FspEI | DraI | |
| FL-15 | | | | | | |
| Moraxella | AKG14689.1 | 111 | 143 | BslI | DraI, ApoI | 5′ TTV |
| bovoculi strain | | | | | | |
| 57922 | | | | | | |
| Candidatus | KKQ38174.1 | 112 | 144 | DdeI, HgaI, | BbsI, MboII | 5′ TTTV |
| Roizmanbacteria | | | | Hpy188I, | | |
| bacterium | DrdI, | | | | | |
| GW2011_GWA2_ | | | | | | |
| 37_7 | | | | | | |
| US54_C0016 | | | | | | |
| Pseudobutyrivibrio | SCZ76797.1 | 113 | 145 | TspRI, FspEI | TspDTI, | 5′ TTTV |
| xylanivorans | | | | | SmoI, BsuI, | |
| | | | | | BpuEI | |
| Prevotella | SER03894.1 | 114 | 146 | TatI, ScaI | EcoRV, PsiI, | 5′ TTTV |
| bryantii B14 | | | | | | |
| Smithella sp. | KFO67988.1 | 115 | 147 | PspGI, | Hhal | 5′ TTTV |
| SCADC | | | | BstNI, | | |
| Smithella sp. | KFO67988.1 | 115 | 148 | EcoRII | CfoI | 5′ TTTV |
| SCADC | | | | | | |
| Bacteroidetes | OFY19591.1 | 116 | 149 | CviQI | DraI | 5′ TTTV |
| bacterium | | | | | | |
| GWF2_33_38 | | | | | | |
| Candidatus | OGJ66851.1 | 117 | 150 | AlwNI, EarI, | EcoRV, | 5′ TTTV |
| Peribacteria | | | | AcuI | NdeI | |
| bacterium | | | | | | |
| RIFCSPLOWO2 | | | | | | |
| Nitrospinae | OGW03971.1 | 118 | 151 | BstAPI, | HaeII | 5′ TTTV |
| bacterium | | | | BsmAI | | |
| RIFCSPLOWO2 | | | | | | |
| Candidatus | OGZ45678.1 | 119 | 152 | BccI, MmeI, | FauI, | 5′ TTTV |
| Ryanbacteria | | | | Hpy188I | HpyAV, | |
| bacterium | | | | | BseNI | |
| RIFCSPHIGHO2 | | | | | | |
| Candidatus | OHA63117.1 | 120 | 153 | MmeI, BglII, | PsiI, Eco57I, | 5′ TTTV |
| Wildermuthbacteria | | | | Hpy188I | | |
| bacterium | | | | | | |
| RIFCSPHIGHO2 | | | | | | |
| Firmicutes | OLA30477.1 | 121 | 154 | BsgI | MaeII | 5′ TTTV |
| bacterium | | | | | | |
| CAG_194_44_15 | | | | | | |
| Candidatus | OIO15737.1 | 122 | 155 | FauI, BbvI | PsiI, SspI, | 5′ TTTV |
| Gottesmanbacteria | | | | | BfrI | |
| bacterium | | | | | | |
| CG1_02_37_22 | | | | | | |
| Candidatus | OIO75780.1 | 123 | 156 | BaeI | BseMII, | 5′ TTTV |
| Gracilibacteria | | | | | BbsI | |
| bacterium | | | | | | |
| CG1_02_38_174 | | | | | | |
| Butyrivibrio | WP_027216152.1 | 124 | 157 | BceAI | PsiI, HphI | 5′ TTTV |
| fibrisolvens | | | | | | |
| MD2001 | | | | | | |
| Sneathia amnii | WP_084710347.1 | 125 | 158 | BccI, BspPI | SspI, DraI | 5′ TTTV |
| strain SN35 | | | | | | |
| Coprococcus | WP_082431329.1 | 126 | 159 | PsiI, ApaLI | TspDTI, | 5′ TTTV |
| eutactus strain | | | | | MaeIII | |
| 2789STDY5608843 | | | | | | |
| Lachnospira | WP_055306762.1 | 127 | 160 | MseI | BccI, SspI, | 5′ TTTV |
| pectinoschiza | | | | | DraI | |
| strain | | | | | | |
| 2789STDY5834886 | | | | | | |
| Bacteroidetes oral | WP_009217842.1 | 128 | 161 | BsrGI, AseI, | TspDTI, | 5′ TTN |
| taxon 274 str. | | | | BsrDI | ApoI | |
| F0058 | | | | | | |
| Arcobacter | WP_052943011.1 | 129 | 162 | MseI | SspI, HindIII | 5′ TTTV |
| butzleri L348 | | | | | | |
| isolate CHRB125 | | | | | | |
| Bacteroidales | WP_066040075.1 | 130 | 163 | BccI, BstXI | EarI | 5′ TTTV |
| bacterium | | | | | | |
| KA00251 | | | | | | |
| Acidaminococcus | WP_075579848.1 | 131 | 164 | BccI, Bpu10I | PleI, MlyI | 5′ TTTV |
| massiliensis strain | | | | | | |
| Marseille-P2828 | | | | | | |
| Helcococcus | WP_005398606.1 | 132 | 165 | AfeI | EcoRV, | 5′-YYN |
| kunzii | | | | | NsiI, BsrDI | |
| Agathobacter | CUO57667.1 | 133 | 166 | ApoI | PsiI | 5′TTN |
| rectalis strain | | | | | | |
| 2789STDY5834884 | | | | | | |
| Acidaminococcus | WP_021736722.1 | 134 | 167 | KasI, NdeI | MmeI, | 5′ TTTV |
| sp. BV3L6 | | | | | Bpu10I, | |
| | | | | | BspMI | |
| Lachnospiraceae | WP_051666128.1 | 135 | 168 | MmeI, HphI | PsiI, AanI | 5′ TTTV |
| bacterium | | | | | | |
| ND2006 | | | | | | |
| Francisella | ABK90267.1 | 136 | 169 | | DraI | 5′ TTTV |
| tularensis subsp. | | | | | | |
| novicida U112 | | | | | | |
| Omnitrophica | OGX23684.1 | 137 | 170 | ApoI | LweI | 5′ TTTV |
| WOR_2 | | | | | | |
| bacterium | | | | | | |
| GWF2_38_59 | | | | | | |
| Candidatus | KKQ38176.1 | 138 | 171 | CseI | BbsI | 5′ TTTV |
| Roizmanbacteria | | | | | | |
| bacterium | | | | | | |
| GW2011_GWA2_ | | | | | | |
| 37_7 | | | | | | |
| US54_C0016 | | | | | | |
| Butyrivibrio | AOZ97886.1 | 204 | 223 | TaaI, | AgsI, | TTTV |
| hungatei strain | | | | CviAII, | HpyCH4V, | |
| MB2003 | | | | SspI, | MnlI, | |
| plasmid | | | | HpyCH4V, | TspGWI, | |
| pNP144, | | | | PpsI | HpyCH4IV | |
| complete | | | | | | |
| sequence | | | | | | |
| Butyrivibrio | AOZ97886.2 | 205 | 224 | MnlI | AluI, TasI, | TTTV |
| hungatei strain | | | | | RsaI | |
| MB2003 | | | | | | |
| plasmid | | | | | | |
| pNP144, | | | | | | |
| complete | | | | | | |
| sequence | | | | | | |
| Butyrivibrio | AOZ97886.3 | 206 | 225 | HpyCH4V, | AgsI, TasI, | TTTV |
| hungatei strain | | | | Sse9I, BccI, | SspI, DraI | |
| MB2003 | | | | AlwI, | | |
| plasmid | | | | Sau3AI, | | |
| pNP144, | | | | MnlI, AgsI | | |
| complete | | | | | | |
| sequence | | | | | | |
| Butyrivibrio | AOZ97886.4 | 207 | 226 | | TaaI | TTTV |
| hungatei strain | | | | | | |
| MB2003 | | | | | | |
| plasmid | | | | | | |
| pNP144, | | | | | | |
| complete | | | | | | |
| sequence | | | | | | |
| [Eubacterium] | ACR72412.1 | 208 | 227 | AgsI | CviAII, | TTTV |
| eligens ATCC | | | | | DraI, AgsI, | |
| 27750 | | | | | TspDTI | |
| chromosome, | | | | | | |
| complete | | | | | | |
| genome | | | | | | |
| Candidatus | AIZ56868.1 | 209 | 228 | Sse9I, | CviAII, | TTTV |
| Methanoplasma | | | | Bsp1407I, | BmsI, PfeI | |
| termitum strain | | | | RsaI, AciI, | BsiSI, TasI, | |
| MpT1, complete | | | | Hpy188I | AgsI | |
| genome | | | | | | |
| Moraxella | AKG14689.1 | 210 | 229 | MseI, AfiI, | AluI | TTTV |
| bovoculi strain | | | | | Cac8I, | |
| 57922 | | | | | HpyCH4V, | |
| chromosome, | | | | | HpyF3I, | |
| complete | | | | | MseI, FatI | |
| genome | | | | | | |
| Francisella | WP_003040289.1 | 211 | 230 | | DdeI, DraI, | TTTV |
| hispaniensis | | | | | TaaI | |
| FSC454, | | | | | | |
| complete | | | | | | |
| genome | | | | | | |
| Saccharobesus | AWB68459.1 | 212 | 231 | | TspDTI, | TTTV |
| litoralis strain | | | | | BstHHI, | |
| CCB-QB4 | | | | | AciI | |
| chromosome, | | | | | | |
| complete | | | | | | |
| genome | | | | | | |
| Treponema | QOS40006.1 | 213 | 232 | ScaI | DdeI, | TTTV |
| rectale strain | | | | Bsp1407I | BseNI, | |
| CHPA | | | | | TspDTI, | |
| chromosome, | | | | | TauI | |
| complete | | | | | | |
| genome | | | | | | |
| Ruminococcus | QCT07655.1 | 214 | 233 | MseI | DdeI, AgsI, | TTTV |
| bovis strain | | | | | MboII, | |
| JE7A12 | | | | | MfeI | |
| chromosome, | | | | | | |
| complete | | | | | | |
| genome | | | | | | |
| Pseudobutyrivibrio | QFJ54394.1 | 215 | 234 | | Hpy188I, | TTTV |
| xylanivorans | | | | | BstYI, | |
| strain MA3014 | | | | | CviAII, | |
| chromosome 1, | | | | | HpyCH4V, | |
| complete | | | | | AgsI | |
| sequence | | | | | | |
| Helcococcus | QUY65005.1 | 216 | 235 | AgsI, AluI | EcoRV, | TTTV |
| kunzii strain | | | | | TspDTI, | |
| H13 | | | | | Bse3DI, | |
| chromosome | | | | | Hin6I | |
| Lachnospira | UEA98518.1 | 217 | 236 | | HpyCH4V, | TTTV |
| eligens strain | | | | | CviAII, | |
| FDAARGOS_ | | | | | Sse9I, | |
| 1570 | | | | | AgsI, | |
| chromosome, | | | | | TspDTI | |
| complete | | | | | | |
| genome | | | | | | |
| candidate | PIP56079.1 | 218 | 237 | BstHHI, | SsiI, PsiI, | TTTV |
| division | | | | MboII, | AsuHPI, | |
| WWE3 | | | | Sse9I, MnlI | MnlI, | |
| bacterium | | | | | MaeIII, | |
| CG22_combo_ | | | | | DdeI, MseI | |
| CG10- | | | | | | |
| 13_8_21_14_all_ | | | | | | |
| 39_12 | | | | | | |
| Patescibacteria | MBU1900830.1 | 219 | 238 | TspDTI, | HpyF10VI, | TTTV |
| group | | | | MfeI, SspI, | BclI | |
| bacterium | | | | MseI, BsaJI, | | |
| | | | | MboII, | | |
| | | | | BseJI, MaeI | | |
| Prevotella sp. | OYP46450.1 | 220 | 239 | CviAII, | RsaI, Sse9I, | TTTV |
| P4-98 | | | | AgsI, Cac8I, | AanI, | |
| | | | | BspFNI | MwoI | |
| Unknown | CasJ | 21 | 240 | | MfeI, | TTTV |
| | | | | | Sse9I, | |
| | | | | | HpyCH4V, | |
| | | | | | MaeI, | |
| | | | | | MseI, SspI | |
| Unknown | CasJ | 222 | 241 | | SspI, MseI, | TTTV |
| | | | | | BssECI, | |
| | | | | | HpyCH4V, | |
| | | | | | MunI, | |
| | | | | | Sse9I | |

[0207] Various DNA expression systems disclosed herein are useful for the expression of these Cas12a tracrRNA sequences. Embodiments include a DNA expression system including (a) DNA sequence for a first promoter; and (b) operably linked and heterologous to the first promoter a DNA sequence encoding a first RNA molecule including a Cas12a tracrRNA and including a restriction endonuclease cleavage site (native or engineered) that is suitable for insertion of a sequence coding for a functional RNA moiety. The functional RNA moiety is characterized by one or more functions. Embodiments of the RNA moiety include RNA sequences for annealing to one or more polynucleotides, RNA sequences that provide structures for binding to other molecules (including proteins or small molecule ligands) or that are catalytically active, or RNA sequences that serve as directly or indirectly detectable labels. Thus, non-limiting embodiments include a DNA expression system including (a) DNA sequence for a first promoter; and (b) operably linked and heterologous to the first promoter a DNA sequence encoding a first RNA molecule including a Cas12a tracrRNA and including a restriction endonuclease cleavage site (native or engineered) that is suitable for insertion of a sequence coding for a functional RNA moiety, wherein the Cas12a tracrRNA has an RNA sequence selected from the group consisting of SEQ ID NOs:1, 3, 6, 139-146, 149-169, 223-240, and 241; in some embodiments, the first promoter includes a DNA sequence selected from the group consisting of SEQ ID NOs:16-71. In other embodiments, the Cas12a tracrRNA is selected from the Cas12a tracrRNA sequences disclosed in U.S. Pat. No. 9,790,490 (incorporated herein by reference).

[0208] In other embodiments, the DNA expression system includes: (a) DNA sequence for a first promoter; (b) operably linked and heterologous to the first promoter a DNA sequence encoding a first RNA molecule including a Cas12a tracrRNA and including a restriction endonuclease cleavage site (native or engineered) that is suitable for insertion of a sequence coding for a functional RNA moiety; (c) optionally, a DNA sequence for a second promoter; (d) operably linked and heterologous to the first promoter or the second promoter, a DNA encoding a Cas12a crRNA that includes a 3′ extension capable of hybridizing with a segment of the first RNA molecule; and (e) optionally, a terminator. In non-limiting embodiments, the Cas12a tracrRNA has an RNA sequence selected from the group consisting of SEQ ID NOs:1, 3, 6, 139-146, 149-169, 223-240, and 241; in some embodiments, the first promoter includes a DNA sequence selected from the group consisting of SEQ ID NOs:16-71; in some embodiments, the optional second promoter includes a DNA sequence selected from the group consisting of SEQ ID NOs:16-71; in some embodiments, the optional terminator includes a DNA sequence selected from the group consisting of SEQ ID NOs:72-100. In embodiments, the first promoter and the DNA encoding the first RNA molecule, and the DNA encoding a Cas12a crRNA that includes a 3′ extension are contained in a single construct, and in other embodiments, the first promoter and the DNA encoding the first RNA molecule are contained in a first construct, and the second promoter and the DNA encoding a Cas12a crRNA that includes a 3′ extension are contained in a second construct. Where the DNA expression system is provided in a first construct and a second construct, these can be provided in a single vector or in separate vectors. In some embodiments wherein the DNA expression system includes DNA encoding a Cas12a crRNA, the first promoter drives expression of both the DNA encoding the first RNA molecule and the DNA encoding the Cas12a crRNA. In some embodiments, the Cas12a tracrRNA further includes a 5′ extension. In many embodiments of the DNA expression system, the Cas12a crRNA is capable of complexing with a Cas12a nuclease to form a Cas12a ribonucleoprotein complex.

[0209] Further embodiments of this disclosure include a DNA expression system including: (a) DNA sequence for a first promoter; and (b) operably linked and heterologous to the first promoter, a DNA sequence encoding a functional RNA molecule including a Cas12a tracrRNA and a functional RNA moiety. The functional RNA moiety is characterized by one or more functions. Embodiments of the RNA moiety include RNA sequences for annealing to one or more polynucleotides, RNA sequences that provide structures for binding to other molecules (including proteins or small molecule ligands) or that are catalytically active, or RNA sequences that serve as directly or indirectly detectable labels. In embodiments, the DNA expression system further includes: (c) optionally, a DNA sequence for a second promoter; (d) operably linked and heterologous to the first promoter or the second promoter, a DNA encoding a Cas12a crRNA that includes a 3′ extension capable of hybridizing with a segment of the functional RNA molecule; and (e) optionally, a terminator. In embodiments, the functional RNA molecule includes a Cas12a tracrRNA having an RNA sequence selected from the group consisting of SEQ ID NOs:1, 3, 6, 139-146, 149-169, 223-240, and 241; in some embodiments, the first promoter includes a DNA sequence selected from the group consisting of SEQ ID NOs:16-71; in some embodiments, the optional second promoter includes a DNA sequence selected from the group consisting of SEQ ID NOs:16-71; in some embodiments, the optional terminator includes a DNA sequence selected from the group consisting of SEQ ID NOs:72-100 or comprise a U6 poly-T terminator, an SV40 terminator, an hGH terminator, a BGH terminator, an rbGlob terminator, or a synthetic terminator functional in a eukaryotic cell. In embodiments wherein the DNA expression system includes the DNA encoding the Cas12a crRNA, the DNA expression system can be provided in a single construct (e.g., where the first promoter drives expression of both the DNA encoding the functional RNA molecule and the DNA encoding the Cas12a crRNA). In embodiments wherein the DNA expression system includes the second promoter, the second promoter can be operably linked to the DNA encoding the crRNA (e.g., in a second construct). In embodiments where the DNA expression system is provided in two constructs, these can be in a single vector or in separate vectors. In embodiments, the Cas12a tracrRNA further includes a 5′ extension. In many embodiments of the DNA expression system, the Cas12a crRNA is capable of complexing with a Cas12a nuclease to form a Cas12a ribonucleoprotein complex.

[0210] The various embodiments of the DNA expression systems disclosed herein are useful for expression of a Cas12a tracrRNA that is: (1) contained in a first RNA molecule including a Cas12a tracrRNA and including a restriction endonuclease cleavage site (native or engineered) that is suitable for insertion of a sequence coding for a functional RNA moiety, or (2) contained in a functional RNA molecule including a Cas12a tracrRNA and a functional RNA moiety. In embodiments, a Cas12a nuclease is associated or complexed with a Cas12a crRNA that is previously, simultaneously, or subsequently associated with, complexed with, or tethered to the Cas12a tracrRNA that is (1) contained in a first RNA molecule including a Cas12a tracrRNA and including a restriction endonuclease cleavage site (native or engineered) that is suitable for insertion of a sequence coding for a functional RNA moiety, or (2) contained in a functional RNA molecule including a Cas12a tracrRNA and a functional RNA moiety, thus forming a Cas12a ribonucleoprotein complex. In embodiments, the resulting Cas12a ribonucleoprotein complex contains (1) the Cas12a nuclease complexed with the first RNA molecule including a Cas12a tracrRNA and including a restriction endonuclease cleavage site (native or engineered) that is suitable for insertion of a sequence coding for a functional RNA moiety, or (2) the Cas12a nuclease complexed with the functional RNA molecule including a Cas12a tracrRNA and a functional RNA moiety. In embodiments, the Cas12a nuclease is one having a naturally occurring sequence (e.g., a native sequence of a Cas12a nuclease such as, but not limited to, LbCas12a, AsCas12a, FnCas12a, and an ObCsm1); in other embodiments, the Cas12a nuclease includes a modification, such as an amino acid sequence modification (e.g., the point-mutations provided in Table 5) and/or a chemical modification such as (a) a localization or signal peptide (e.g., a nuclear localization signal (NLS), a chloroplast or plastid transit peptide (CTP), or a mitochondrial targeting peptide (MTP)); (b) a detectable label (e.g., a fluorescent dye); (c) a cell-penetrating peptide; (d) an endosomal escape peptide; and (e) an affinity tag. In embodiments, the Cas12a nuclease is one selected from the Cas12a (“Cpf1”) nucleases, Cpf1 orthologues, and Cpf1 variants (including the codon-optimized variants) disclosed in U.S. Pat. No. 9,790,490; the Cas12a (“Cpf1”) nuclease sequences disclosed in U.S. Patent Application Publication 2018/0282713 (see, e.g., FIG. 3 and Example 5); and Cas12a (“Cpf1”) nuclease sequences disclosed in U.S. Pat. No. 9,896,696; all of these cited patents and patent application publications are incorporated herein by reference. In specific embodiments, the Cas12a nuclease is a Cas12a (“Cpf1”) nuclease identified from Francisella novicida U112 (FnCas12a or “FnCpf1”), from Acidaminococcus sp. BV3L6 (AsCas12a or “AsCpf1”), or from Lachnospiraceae bacterium ND2006 (LbCas12a or “LbCpf1”), or is an orthologue thereof, such as an orthologue having at least 50% sequence identity to FnCas12a (“FnCpf1”); see, e.g., the FnCpf1 nuclease contained in the FnCpf1 locus having SEQ ID NO:211 in U.S. Pat. No. 9,790,490, specifically incorporated herein by reference. In other specific embodiments, the Cas12a nuclease is a Cas12a nuclease having Cas12a nuclease activity and having at least 80%, at least 85%, at least 90%, or at least 95% sequence identity with a sequence selected from the group consisting of SEQ ID NOs:11, 107-138, 172, 204-221, and 222. Table 5 provides non-limiting examples of Cas12a nucleases and sequence variants thereof that are useful with the DNA expression systems and engineered systems provided in this disclosure. Most of the point mutations (those not marked with an * or **) provided in Table 5 are designed to increase the efficiency or efficacy of gene editing by the nuclease (in comparison to the unaltered native nuclease). Increased efficiency or efficacy of gene editing includes but is not limited to: altered translation, folding, and/or stability of the Cas12a nuclease or ribonucleoprotein; altered affinity and/or specificity of target binding; altered Cas12a nuclease efficiency on target and/or non-target strands; altered PAM recognition specificity; and altered DNA repair or modification outcomes (e.g., indel rates). The Ca12a nuclease sequence variants include: (1) a variant LbCpf1 that differs from a wild-type LbCpf1 sequence (SEQ ID NO:135) in containing at least one point mutation selected from the group consisting of G309P, Y312F, M4741, D523N, Q531K, C930A, D937N, V954F/Q, M975L, A984E, I994L, T1006K, I1014V, V1055N/D, L1065F/Y, Y1180F, V1209G, I1229L, V801I, Y802I, D850A, E943A, and D1198A; (2) a variant AsCpf1 that differs from a wild-type AsCpf1 sequence (SEQ ID NO:134) in containing at least one point mutation selected from the group consisting of L320P, V980A, Q987N, T1004F/Q, K1035E, T1057K, D1107N, F1117Y, N1291L, D908A, E993A, and D1263A; and (3) a variant FnCpf1 that differs from a wild-type FnCpf1 sequence (SEQ ID NO:172) in containing at least one point mutation selected from the group consisting of I339P, L342F, Q588K, F1017Q, K1047E, N1118D, F1128Y, L867I, D917A, E1006A, and D1255A. The systems and compositions including a tracrRNA and methods of use thereof that are disclosed herein can also be employed with related Cas nucleases, including Csm nucleases, e.g., ObCsm1 (GenBank accession number OGX23684), SmCsm1 (GenBank accession number KF067988), MiCsm1 (GenBank accession number KKQ38176), or SuCsm1 (GenBank accession number KIM12007) (see, e.g., Begemann et al. (2017) bioRxiv, publicly available at dx[dot]doi[dot]org/10[dot]1101/192799), nucleases having a sequence selected from the group consisting of SEQ ID NOs:115, 137, 138, and variants thereof, such as a variant ObCsm1 that differs from a wild-type ObCsm1 sequence (SEQ ID NO:137) in containing at least one point mutation selected from the group consisting of K382N, Q393K, S925A, E933N, K943F/Q, K972L, K1064G, P670I, N671I, D727A, E939A, and D1053A.

TABLE 5

| LbCpf1 | AsCpf1 | FnCpf1 | ObCsm1 |
|---|---|---|---|
| (WP_051666128) | (WP_021736722) | (WP_003034647) | (OGX23684) |
| (SEQ ID NO: 135) | (SEQ ID NO: 134) | (SEQ ID NO: 172) | (SEQ ID NO: 137) |
| G309P | L320P | I339P | — |
| Y312F | wt | L342F | — |
| M474I | wt | wt | — |
| D523N | wt | wt | K382N |
| Q531K | wt | Q588K | Q393K |
| C930A | V980A | wt | S925A |
| D937N | Q987N | wt | E933N |
| V954F/Q | T1004F/Q | F1017Q | K943F/Q |
| M975L | wt | wt | K972L |
| A984E | K1035E | K1047E | — |
| I994L | wt | wt | — |
| T1006K | T1057K | wt | wt |
| I1014V | wt | wt | wt |
| V1055N/D | D1107N | N1118D | — |
| L1065F/Y | F1117Y | F1128Y | — |
| Y1180F | wt | wt | wt |
| V1209G | wt | wt | K1064G |
| I1229L | N1291L | wt | — |
| V801I* | wt | L867I* | P670I* |
| Y802I* | wt | wt | N671I* |
| D850A** | D908A** | D917A** | D727A** |
| E943A** | E993A** | E1006A** | E939A** |
| D1198A** | D1263A** | D1255A** | D1053A** |

“wt” = wild type
*mutation expected to increase stabilization of nuclease/crRNA association
**mutation expected to decrease or eliminate endonuclease activity

### Example 7

[0211] This example illustrates compositions and systems including a Cas12a nuclease, a Cas12a crRNA that comprises a 3′ extension, and a Cas12a tracrRNA. More specifically, this illustrates an engineered system including a Cas12a crRNA that includes an artificial 3′ ribonucleotide extension including a detectable label (a fluorophore) for in vivo identification of cells containing the Cas12a crRNA. The Cas12a crRNA is synthesized for delivery to plant cells as a ribonucleoprotein complex with a Cas12a nuclease, and (2) cloned into a plant expression vector system for co-expression with Cas12a in vivo.

[0212] A ZmLc crRNA was designed with the nucleotide sequence of SEQ ID NO:179 including the direct repeat sequence of SEQ ID NO:180 and the spacer sequence of SEQ ID NO:181 for targeting the promoter of the Zea mays Lc gene (GRMZM5G822829); this ZmLc crRNA sequence was modified to contain 11 nucleotides adjacent to and 3′ to the spacer region, yielding an engineered 3′-extended ZmLc crRNA. The 3′-extended crRNA sequence is encoded into a dsDNA template downstream of a T7 polymerase binding site and initiator for in vitro transcription using the HiScribe™ T7 High Yield RNA Synthesis Kit (catalogue number E2050S, New England BioLabs, Ipswich, Mass.). Alternatively, the 3′-extended crRNA is chemically synthesized by IDT (Coralville, Iowa), optionally containing chemical modifications or non-natural components. The 3′-extended crRNA is further modified to contain a fluorescent or fluorophore-conjugated nucleotide or nucleotide analog, such as cytidine-5′-phosphate-3′-(6-aminohexyl)phosphate conjugated to Cy5 (NU-1706-CY5, Jena Bioscience, Jena, Germany), at its 3′ end using T4 RNA ligase. Alternatively, the 3′-extended crRNA containing one or multiple fluorescent components within or following the polynucleotide extension (e.g., 3′ ATTO™ 590 (NHS Ester)) is chemically synthesized by IDT (Coralville, Iowa).

[0213] Fluorescent Cas12a ribonucleoprotein complexes (RNPs) are generated with the fluorophore-labelled 3′-extended crRNA, a modified Cas12a nuclease (SEQ ID NO:182), and a Cas12 tracrRNA (SEQ ID NO:3) following the protocols described below in Example 8, incubated with nanoparticles (e.g., 0.6 micrometer gold microcarriers, catalogue number 1652262, BioRad Laboratories, Inc., Hercules, Calif.), and biolistically delivered to meristematic tissue using standard protocols similar to or adapted from Liang et al. (2017) Nature Communications, 8:14261, doi:10.1038/ncomms14261. Meristems are further visualized under a fluorescent microscope several hours following delivery to identify and isolate transformed meristem from non-transformed cells or tissue. Optionally, the transformed meristem is grown into callus or plants.

### Example 8

[0214] This example illustrates compositions and engineered genome editing systems including a Cas12a nuclease, a Cas12acrRNA, and a Cas12a tracrRNA. In addition to the usefulness of an RNA molecule including a Cas12a tracrRNA for, e.g., tethering a donor polynucleotide to a Cas12a nuclease/crRNA ribonucleoprotein (RNP) complex, it was discovered that addition of a molar excess of tracrRNA to an editing system including a Cas12a nuclease/crRNA RNP unexpectedly resulted in an increase of the overall efficiency of genome editing at a given concentration of RNP.

[0215] Protoplasts were prepared from leaves of 2-week old maize (Zea mays, variety B104) plants, following a protocol previously described (see Example 1 in U.S. patent application Ser. No. 16/480,992 (filed on 25 Jul. 2019 as the national phase application based on PCT/US2018/015793 filed on 29 Jan. 2018 and published as WO2018/140899), incorporated herein by reference.

[0216] Reagents were prepared as follows. The modified Cas12a nuclease employed in this experiment had the amino acid sequence of SEQ ID NO:182; included in this sequence are (a) the native Cas12a nuclease sequence (amino acids positions 19-1246 of SEQ ID NO:182), (b) remains of a linker sequence (amino acid positions 1-7 of SEQ ID NO:182), (c) two linker sequences (amino acid positions 15-18 and 1247-1250 of SEQ ID NO:182), (d) an N-terminus nuclear localization signal (NLS) sequence (amino acid positions 8-14 of SEQ ID NO:182), and (e) a C-terminus linker/NLS (amino acid positions 1247-1259 of SEQ ID NO:182). The Cas12a nuclease (5.85 milligrams/milliliter in aqueous buffer containing 25 millimolar Tris-HCl, 300 millimolar NaCl, 0.1 millimolar EDTA, pH 7.4) was diluted with dilution buffer (25 millimolar Tris-HCl, 300 millimolar NaCl, 0.1 millimolar EDTA, 40% glycerol, pH 7.4) to a final concentration of 1.25 milligrams/milliliter nuclease and 31.5% glycerol. A 30 micromolar solution of Cas12a tracrRNA with the nucleotide sequence of SEQ ID NO:3 was prepared in reaction buffer (40 mM HEPES, 200 mM NaCl, 10 mM MgCl2, and 0.2 mM EDTA, pH 6.5). Additional solutions of 40% polyethylene glycol 4000 (PEG), maize washing solution (0.6 molar mannitol, 4 millimolar MES pH 5.7, and 20 millimolar KCl), and PIM containing 50 millimolar CaCl₂ (previously described in Table 25, U.S. patent application Ser. No. 16/480,992, filed on 25 Jul. 2019 as the national phase application based on PCT/US2018/015793 filed on 29 Jan. 2018 and published as WO2018/140899, incorporated herein by reference) were prepared. All solutions were aliquoted into 96-well deep plates and sealed until needed for use in a Biomek FX^{P} automated liquid handler (Beckman Coulter Life Sciences, Indianapolis, Ind.).

[0217] Ribonucleoproteins (RNPs) were prepared with a Cas12a nuclease having the sequence of SEQ ID NO:182 and an ZmLc crRNA with the nucleotide sequence of SEQ ID NO:179 including the direct repeat sequence of SEQ ID NO:180 and the spacer sequence of SEQ ID NO:181 for targeting the promoter of the Zea mays Lc gene (GRMZM5G822829). Following a preferred protocol, the ZmLc crRNA was resuspended in reaction buffer to a concentration of 25 micromolar; 1680 microliters of the diluted ZmLc crRNA was mixed with 560 microliters of the Cas12a nuclease solution and incubated 20 minutes at room temperature. To this mixture 1400 microliters of the Cas12a tracrRNA was added and mixed; this “Cas12a nuclease/ZmLc crRNA/tracrRNA editing system” was apportioned in 225 microliter aliquots into 8-strip PCR tubes.

[0218] Four mixtures were prepared for use as diluents.

[0219] “Diluent 1” (Cas12a nuclease/GmSHAT1-5 crRNA/tracrRNA) was prepared by mixing 420 microliters of 25 micromolar GmSHAT1-5 crRNA (serving as a non-specific Cas12a crRNA, this was designed to target Glycine max SHAT1-5, see www[dot]uniprot[dot]org/uniprot/W8E7P1) in reaction buffer (40 mM HEPES, 200 mM NaCl, 10 mM MgCl2, and 0.2 mM EDTA, pH 6.5) and 140 microliters of the Cas12a nuclease solution, incubating for 20 minutes at room temperature, and then adding 350 microliters of the Cas12a tracrRNA solution. This was apportioned in 225 microliter aliquots into 8-strip PCR tubes.

[0220] “Diluent 2” (Cas12a nuclease/GmSHAT1-5 crRNA) was prepared by mixing 420 microliters of 25 micromolar GmSHAT5-1 crRNA in reaction buffer (40 mM HEPES, 200 mM NaCl, 10 mM MgCl2, and 0.2 mM EDTA, pH 6.5) and 140 microliters of the Cas12a nuclease solution, incubating for 20 minutes at room temperature, and then adding 350 microliters of the reaction buffer (40 mM HEPES, 200 mM NaCl, 10 mM MgCl2, and 0.2 mM EDTA, pH 6.5). This was apportioned in 225 microliter aliquots into 8-strip PCR tubes.

[0221] “Diluent 3” (Cas12a tracr) was prepared by mixing 350 microliters of the Cas12a tracrRNA solution with 560 microliters of reaction buffer (40 mM HEPES, 200 mM NaCl, 10 mM MgCl2, and 0.2 mM EDTA, pH 6.5). This was apportioned in 225 microliter aliquots into 9-strip PCR tubes.

[0222] “Diluent 4” consisted of reaction buffer (40 mM HEPES, 200 mM NaCl, 10 mM MgCl2, and 0.2 mM EDTA, pH 6.5) only. This was apportioned in 225 microliter aliquots into 9-strip PCR tubes.

[0223] Transfections of the maize protoplasts were carried out in the Biomek FX^{P} automated liquid handler. A 16-microliter aliquot of the protoplast suspension was added to each well of a U-Bottom 96 well plate pre-coated with 5% Calf Serum with lid removed. A titration series of the Cas12a nuclease/ZmLc crRNA/tracrRNA editing system was made across twelve wells of a master titration plate using the four different diluents; this was stored on the cold block until transfection. The titrations resulted in a dilution series of the Cas12a nuclease/ZmLc crRNA/tracrRNA editing system, as shown in Table 6, which provides the resulting ratios between the additional Cas12a tracrRNA (provided in the diluent) to Cas12a nuclease (provided in the Cas12a nuclease/ZmLc crRNA/tracrRNA editing system).

TABLE 6

| Cas12a nuclease | Cas12a tracrRNA | Cas12a tracrRNA:Cas12a |
|---|---|---|
| (pmol) | (pmol) | nuclease ratio |
| 0.00 | 193.70 | — |
| 2.13 | 193.70 | 90.81 |
| 4.06 | 193.70 | 47.71 |
| 5.99 | 193.70 | 32.36 |
| 7.88 | 193.70 | 24.59 |
| 9.80 | 193.70 | 19.76 |
| 11.73 | 193.70 | 16.51 |
| 13.66 | 193.70 | 14.18 |
| 15.58 | 193.70 | 12.43 |
| 17.48 | 193.70 | 11.08 |
| 19.40 | 193.70 | 9.98 |
| 21.33 | 193.70 | 9.08 |

[0224] Transfections were performed in triplicate. For transfection, 16 microliters of a given titrated dilution was added to each protoplast-containing well, and mixed; 32 microliters of 40% PEG solution are added and mixed, and the plate incubated 5 minutes at room temperature. Sequential additions of maize washing buffer were dispensed across the plate and mixed, and the plate was removed from the automated liquid handler, covered, and centrifuged. The plate was returned to the automated liquid handler for removal of the majority of the supernatant, and the protoplasts resuspended in 120 microliters PIM containing 50 millimolar CaCl₂. The plate was covered and incubated at 27 degrees Celsius in the dark for 48 hours before harvesting. Genomic DNA was isolated from the protoplasts, quantified using QuantiFluor (Promega Corporation, Madison, Wis.), and subjected to PCR amplification followed by amplicon sequencing to detect indel edits.

[0225] Results, given as the fraction of protoplasts containing an indel at the predicted cleavage site versus the amount of Cas12a nuclease used, are illustrated in FIG. 12. The data indicate that dilutions made with Diluent 2 (Cas12a nuclease/GmSHAT1-5 crRNA in reaction buffer) had no significant effect when compared to the control dilution with Diluent 4 (reaction buffer only). In contrast, dilutions made with Diluent 3 (Cas12a tracrRNA in reaction buffer) markedly increased the editing efficiency at the majority of the nuclease amounts tested; the additional Cas12a tracrRNA appeared to decrease the amount of Cas12a nuclease required to achieve 75% editing to 5.99 pmol, i.e., about a third of the Cas12a nuclease amount needed to achieve the same level of editing efficiency in the control dilution (15.58 pmol). Dilutions made with Diluent 1 (Cas12a nuclease/GmSHAT1-5 crRNA/tracrRNA in reaction buffer) also appeared to slightly increase the editing efficiency of a given amount of Cas12a nuclease; since the difference between Diluent 1 and Diluent 2 was the presence of the Cas12a tracrRNA, it is likely that the increased editing efficiency was due to the Cas12a tracrRNA.

### Example 9

[0226] This example illustrates compositions and engineered genome editing systems including a Cas12a nuclease, a Cas12acrRNA, and a Cas12a tracrRNA. More specifically, this example illustrates additional experiments that confirmed that addition of a molar excess of tracrRNA to an editing system including a Cas12a nuclease/crRNA RNP unexpectedly resulted in an increase of the overall efficiency of genome editing at a given concentration of RNP.

[0227] To further investigate the effects of including a molar excess of Cas12a tracrRNA in a Cas12a nuclease/crRNA/tracrRNA editing system, additional experiments were carried out using different Cas12a crRNAs.

[0228] Protoplasts were prepared from etiolated middle leaves of 12-day old maize (Zea mays, variety B104) plants, following a protocol previously described (see Example 1 in U.S. patent application Ser. No. 16/480,992 (filed on 25 Jul. 2019 as the national phase application based on PCT/US2018/015793 filed on 29 Jan. 2018 and published as WO2018/140899), incorporated herein by reference.

[0229] One experiment tested the effects of various diluents on Cas12a RNPs including a Cas12a nuclease and a “high-performing” Cas12a crRNA, GD-48, which routinely produced indel edits at a frequency between 80-90%. Another experiment tested the effects of various diluents on Cas12a RNPs including a Cas12a nuclease and a “low-performing” Cas12a crRNA, GD-14, which routinely produced indel edits at frequencies below 25%. The nucleotide sequence of both Cas12a crRNAs included, from 5′ to 3′, a direct repeat sequence (SEQ ID NO:180) and a spacer sequence having perfect complementarity to a specific target sequence in the maize B104 genome.

[0230] Experimental procedures were similar to those described in Example 8. The Cas12a nuclease (SEQ ID NO:182) (5.85 milligrams/milliliter in aqueous buffer containing 25 millimolar Tris-HCl, 300 millimolar NaCl, 0.1 millimolar EDTA, pH 7.4) was diluted with dilution buffer (25 millimolar Tris-HCl, 300 millimolar NaCl, 0.1 millimolar EDTA, 40% glycerol, pH 7.4) to a final concentration of 1.25 milligrams/milliliter nuclease and 31.5% glycerol. A 30 micromolar solution of Cas12a tracrRNA (SEQ ID NO:3) was prepared in reaction buffer (40 mM HEPES, 200 mM NaCl, 10 mM MgCl2, and 0.2 mM EDTA, pH 6.5). A 1.25 milligram/milliliter solution of bovine serum albumen (BSA) was prepared in protein storage buffer (25 millimolar Tris-HCl, 300 millimolar NaCl, 0.1 millimolar EDTA, 1 millimolar dithiothreitol, 40% glycerol, pH 7.4). Additional solutions of 40% polyethylene glycol 4000 (PEG), maize washing solution (0.6 molar mannitol, 4 millimolar MES pH 5.7, and 20 millimolar KCl), and PIM containing 50 millimolar CaCl₂ (previously described in Table 25, U.S. patent application Ser. No. 16/480,992, filed on 25 Jul. 2019 as the national phase application based on PCT/US2018/015793 filed on 29 Jan. 2018 and published as WO2018/140899, incorporated herein by reference) were prepared. All solutions were aliquoted into 96-well deep plates and sealed until needed for use in a Biomek FX^{P} automated liquid handler (Beckman Coulter Life Sciences, Indianapolis, Ind.).

[0231] Cas12a ribonucleoproteins (RNPs) were prepared with a Cas12a nuclease having the sequence of SEQ ID NO:182 and the “high-performing” Cas12a crRNA, GD-48 as well as the “low-performing” Cas12a crRNA, GD-14. Following a preferred protocol, each Cas12a crRNA was resuspended in reaction buffer to a concentration of 25 micromolar; 1680 microliters of the diluted Cas12a crRNA was mixed with 560 microliters of the Cas12a nuclease solution and incubated 20 minutes at room temperature. To this mixture 1400 microliters of the Cas12a tracrRNA was added and mixed; the resulting “Cas12a nuclease/GD-48 crRNA/tracrRNA editing system” and “Cas12a nuclease/GD-14 crRNA/tracrRNA editing system” were apportioned in 225 microliter aliquots into 8-strip PCR tubes.

[0232] Four mixtures were prepared for use as diluents.

[0233] “Diluent 1” (Cas12a nuclease/GmSHAT1-5 crRNA/tracrRNA) was prepared by mixing 420 microliters of 25 micromolar GmSHAT1-5 crRNA in reaction buffer (40 mM HEPES, 200 mM NaCl, 10 mM MgCl2, and 0.2 mM EDTA, pH 6.5) and 140 microliters of the Cas12a nuclease solution, incubating for 20 minutes at room temperature, and then adding 350 microliters of the Cas12a tracrRNA solution. This was apportioned in 225 microliter aliquots into 8-strip PCR tubes.

[0234] “Diluent 2” (BSA) was prepared by mixing 140 microliters of the BSA stock solution with 770 microliters of reaction buffer (40 mM HEPES, 200 mM NaCl, 10 mM MgCl2, and 0.2 mM EDTA, pH 6.5). This was apportioned in 225 microliter aliquots into 8-strip PCR tubes.

[0235] “Diluent 3” (GmSHAT1-5 crRNA/tracrRNA) was prepared by mixing 420 microliters of the GmSHAT1-5 crRNA, 350 microliters of the Cas12a tracrRNA solution, and 140 microliters of reaction buffer (40 mM HEPES, 200 mM NaCl, 10 mM MgCl2, and 0.2 mM EDTA, pH 6.5). This was apportioned in 225 microliter aliquots into 9-strip PCR tubes.

[0236] “Diluent 4” consisted of reaction buffer (40 mM HEPES, 200 mM NaCl, 10 mM MgCl2, and 0.2 mM EDTA, pH 6.5) only. This was apportioned in 225 microliter aliquots into 9-strip PCR tubes.

[0237] Transfections of the maize protoplasts were carried out in the Biomek FX^{P} automated liquid handler. A 16-microliter aliquot of the protoplast suspension was added to each well of a U-Bottom 96 well plate pre-coated with 5% Calf Serum with lid removed. A titration series of the Cas12a nuclease/ZmLc crRNA/tracrRNA editing system was made across twelve wells of a master titration plate using the four different diluents; this was stored on the cold block until transfection.

[0238] Transfections were performed in triplicate. For transfection, 16 microliters of a given titrated dilution was added to each protoplast-containing well, and mixed; 32 microliters of 40% PEG solution are added and mixed, and the plate incubated 5 minutes at room temperature. Sequential additions of maize washing buffer were dispensed across the plate and mixed, and the plate was removed from the automated liquid handler, covered, and centrifuged. The plate was returned to the automated liquid handler for removal of the majority of the supernatant, and the protoplasts resuspended in 120 microliters PIM containing 50 millimolar CaCl₂. The plate was covered and incubated at 27 degrees Celsius in the dark for 36 hours before harvesting. Genomic DNA was isolated from the protoplasts, quantified using QuantiFluor (Promega Corporation, Madison, Wis.), and subjected to PCR amplification followed by amplicon sequencing to detect indel edits.

[0239] Results, given as the fraction of protoplasts containing an indel at the predicted cleavage site versus the amount of Cas12a nuclease used, are illustrated in FIGS. 13 and 14. The data indicate that dilutions made with Diluent 2 (BSA in reaction buffer) had no significant effect when compared to the control dilution with Diluent 4 (reaction buffer only). In contrast, dilutions made with Diluent 3 (GmSHAT1-5 crRNA/tracrRNA in reaction buffer) markedly increased the editing efficiency at the majority of the Cas12a nuclease amounts tested for both Cas12a crRNAs tested. In the case of the “high-performing” Cas12a crRNA, GD-48, the indel editing frequency reached about maximum (about 90-95%) at much lower Cas12a nuclease concentrations with Diluent 3 than with Diluent 4 (reaction buffer control); use of this Cas12a tracrRNA-containing diluent appeared to decrease the amount of Cas12a nuclease required to achieve about 90% editing to about 2.13 pmol, i.e., about one-seventh the amount of Cas12a nuclease needed to achieve the same level of editing efficiency in the control dilution (15.58 pmol). Dilutions made with Diluent 1 (Cas12a nuclease/GmSHAT1-5 crRNA/tracrRNA in reaction buffer) also appeared to increase the editing efficiency of a given amount of Cas12a nuclease; use of this diluent appeared to decrease the amount of Cas12a nuclease required to achieve about 90% editing to about 11.73 pmol, i.e., about 75% of the amount of Cas12a nuclease needed to achieve the same level of editing efficiency in the control dilution (15.58 pmol).

[0240] In the case of the “low-performing” Cas12a crRNA, GD-14, the indel editing frequency reached about maximum (about 30%) at much lower Cas12a nuclease concentrations with Diluent 3 than with Diluent 4 (the reaction buffer control). Furthermore, use of Diluent 3 resulted in a higher maximum indel editing frequency (about 30%), compared to that obtained with Diluent 4 (only about 20%). Thus, use of Diluent 3 increased overall indel editing efficiency by about fifty percent, and reached maximum editing efficiency at a Cas12a nuclease concentration that was estimated to be at least less than half of the Cas12a nuclease concentration needed to reach the maximum editing efficiency observed in the control dilution. Dilutions made with Diluent 1 (Cas12a nuclease/GmSHAT1-5 crRNA/tracrRNA in reaction buffer) also appeared to increase the editing efficiency of a given amount of Cas12a nuclease; the maximum editing efficiency (about 30%) was also greater than that seen with Diluent 4, and this level was reached with about 15.58 pmol of Cas12a nuclease in Diluent 1.

[0241] Various embodiments of the systems, methods, and compositions provided herein are included in the following non-limiting list of numbered embodiments.
[0242] 1. A method of tethering a functional RNA molecule to a Cas12a crRNA, the method comprising hybridizing
   [0243] (a) a functional RNA molecule comprising a Cas12a tracrRNA and a functional RNA moiety; and
   [0244] (b) a Cas12a crRNA that comprises a 3′ extension capable of hybridizing with a segment of the functional RNA molecule;
      [0245] thereby tethering the functional RNA molecule to the Cas12a crRNA.
[0246] 2. The method of embodiment 1, wherein the functional RNA molecule is provided by transcription of a DNA molecule comprising DNA encoding the Cas12a tracrRNA and DNA encoding the functional RNA moiety, wherein the DNA encoding the functional RNA moiety is inserted at a restriction endonuclease cleavage site in or adjacent to the DNA encoding the Cas12a tracrRNA.
[0247] 3. The method of embodiment 2, wherein the restriction endonuclease cleavage site is native.
[0248] 4. The method of embodiment 2, wherein the restriction endonuclease cleavage site is artificial.
[0249] 5. The method of embodiment 1, wherein the crRNA 3′ extension comprises nucleotides that when base-paired form about one helical turn.
[0250] 6. The method of embodiment 1, wherein the crRNA 3′ extension comprises at least 10 contiguous nucleotides.
[0251] 7. The method of any one of embodiments 1 to 6, wherein the functional RNA moiety is at least one selected from the group consisting of:
   [0252] (a) an RNA sequence for annealing to a donor polynucleotide;
   [0253] (b) an RNA sequence for annealing to the crRNA 3′ extension;
   [0254] (c) a terminator sequence;
   [0255] (d) an RNA aptamer;
   [0256] (e) a ribozyme;
   [0257] (f) a detectable label;
   [0258] (g) a bar-coding sequence; and
   [0259] (h) an RNA sequence forming at least partially double-stranded RNA.
[0260] 8. The method of any one of embodiments 1 to 6, wherein the functional RNA moiety comprises RNA forming at least partially double-stranded RNA capable of silencing a gene.
[0261] 9. The method of any one of embodiments 1 to 8, wherein the Cas12a crRNA is complexed with, or is capable of complexing with, a Cas12a nuclease to form a Cas12a ribonucleoprotein complex containing the functional RNA molecule.
[0262] 10. The method of embodiment 9, wherein the Cas12a nuclease is:
   [0263] (a) a Cas12a nuclease identified from the genome of a bacterial species selected from the group consisting of Francisella tularensis 1, Prevotella albensis, Lachnospiraceae bacterium MC2017 1, Butyrivibrio proteoclasticus, Peregrinibacteria bacterium GW2011_GWA2_33_10, Parcubacteria bacterium GW2011_GWC2_44_17, Smithella sp. SCADC, Acidaminococcus sp. BV3L6, Lachnospiraceae bacterium MA2020, Candidatus Methanoplasma termitum, Eubacterium eligens, Moraxella bovoculi 237, Leptospira inadai, Lachnospiraceae bacterium ND2006, Porphyromonas crevioricanis 3, Prevotella disiens and Porphyromonas macacae; or
   [0264] (b) a Cas12a nuclease selected from the group consisting of LbCas12a, AsCas12a, FnCas12a, and a deactivated Cas12a nuclease; or
   [0265] (c) a Cas12a nuclease having at least 80% sequence identity with a sequence selected from the group consisting of SEQ ID NOs:11, 107-138, 172, 204-221, and 222; or
   [0266] (d) a Cas12a nuclease variant selected from the group consisting of (1) a variant LbCpf1 that differs from a wild-type LbCpf1 sequence (SEQ ID NO:135) in containing at least one point mutation selected from the group consisting of G309P, Y312F, M4741, D523N, Q531K, C930A, D937N, V954F/Q, M975L, A984E, I994L, T1006K, I1014V, V1055N/D, L1065F/Y, Y1180F, V1209G, I1229L, V801I, Y802I, D850A, E943A, and D1198A; (2) a variant AsCpf1 that differs from a wild-type AsCpf1 sequence (SEQ ID NO:134) in containing at least one point mutation selected from the group consisting of L320P, V980A, Q987N, T1004F/Q, K1035E, T1057K, D1107N, F1117Y, N1291L, D908A, E993A, and D1263A; (3) a variant FnCpf1 that differs from a wild-type FnCpf1 sequence (SEQ ID NO:172) in containing at least one point mutation selected from the group consisting of I339P, L342F, Q588K, F1017Q, K1047E, N1118D, F1128Y, L867I, D917A, E1006A, and D1255A; and (4) a variant ObCsm1 sequence that differs from a wildtype ObCsm1 sequence (SEQ ID NO:137) in containing at least one point mutation selected from the group consisting of K382N, Q393K, S925A, E933N, K943F/Q, K972L, K1064G, P670I, N671I, D727A, E939A, and D1053A.
[0267] 11. The method of embodiment 9 or embodiment 10, wherein the Cas12a nuclease comprises at least one modification selected from the group consisting of:
   [0268] (a) a localization signal;
   [0269] (b) a detectable label;
   [0270] (c) a cell-penetrating peptide;
   [0271] (d) an endosomal escape peptide; and
   [0272] (e) an affinity tag.
[0273] 12. A modified Cas12a ribonucleoprotein complex comprising
   [0274] (a) a Cas12a nuclease;
   [0275] (b) a functional RNA molecule comprising a Cas12a tracrRNA and a functional RNA moiety; and (c) a Cas12a crRNA that comprises a 3′ extension capable of hybridizing with a segment of the functional RNA molecule.
[0276] 13. The modified Cas12a ribonucleoprotein complex of embodiment 12, wherein the Cas12a nuclease is:
   [0277] (a) a Cas12a nuclease identified from the genome of a bacterial species selected from the group consisting of Francisella tularensis 1, Prevotella albensis, Lachnospiraceae bacterium MC2017 1, Butyrivibrio proteoclasticus, Peregrinibacteria bacterium GW2011_GWA2_33_10, Parcubacteria bacterium GW2011_GWC2_44_17, Smithella sp. SCADC, Acidaminococcus sp. BV3L6, Lachnospiraceae bacterium MA2020, Candidatus Methanoplasma termitum, Eubacterium eligens, Moraxella bovoculi 237, Leptospira inadai, Lachnospiraceae bacterium ND2006, Porphyromonas crevioricanis 3, Prevotella disiens and Porphyromonas macacae; or
   [0278] (b) a Cas12a nuclease selected from the group consisting of LbCas12a, AsCas12a, FnCas12a, and a deactivated Cas12a nuclease; or
   [0279] (c) a Cas12a nuclease having at least 80% sequence identity with a sequence selected from the group consisting of SEQ ID NOs:11, 107-138, 172, 204-221, and 222; or
   [0280] (d) a Cas12a nuclease variant selected from the group consisting of (1) a variant LbCpf1 that differs from a wild-type LbCpf1 sequence (SEQ ID NO:135) in containing at least one point mutation selected from the group consisting of G309P, Y312F, M4741, D523N, Q531K, C930A, D937N, V954F/Q, M975L, A984E, I994L, T1006K, I1014V, V1055N/D, L1065F/Y, Y1180F, V1209G, I1229L, V801I, Y802I, D850A, E943A, and D1198A; (2) a variant AsCpf1 that differs from a wild-type AsCpf1 sequence (SEQ ID NO:134) in containing at least one point mutation selected from the group consisting of L320P, V980A, Q987N, T1004F/Q, K1035E, T1057K, D1107N, F1117Y, N1291L, D908A, E993A, and D1263A; (3) a variant FnCpf1 that differs from a wild-type FnCpf1 sequence (SEQ ID NO:172) in containing at least one point mutation selected from the group consisting of I339P, L342F, Q588K, F1017Q, K1047E, N1118D, F1128Y, L867I, D917A, E1006A, and D1255A; and (4) a variant ObCsm1 sequence that differs from a wildtype ObCsm1 sequence (SEQ ID NO:137) in containing at least one point mutation selected from the group consisting of K382N, Q393K, S925A, E933N, K943F/Q, K972L, K1064G, P670I, N671I, D727A, E939A, and D1053A.
[0281] 14. The modified Cas12a ribonucleoprotein complex of embodiment 12 or embodiment 13, wherein the Cas12a nuclease comprises at least one modification selected from the group consisting of: (a) a localization signal;
   [0282] (b) a detectable label;
   [0283] (c) a cell-penetrating peptide;
   [0284] (d) an endosomal escape peptide; and
   [0285] (e) an affinity tag.
[0286] 15. A method of integrating a nucleotide sequence encoded by a donor polynucleotide at a specific locus in a target DNA, the method comprising:
   [0287] (a) annealing a donor polynucleotide to the modified Cas12a ribonucleoprotein complex of embodiment 12, wherein the functional RNA moiety comprises an RNA sequence for annealing to the donor polynucleotide, and wherein the Cas12a crRNA comprises a spacer sequence that corresponds to a specific target locus in a target DNA, thus forming a donor: RNP complex; and
   [0288] (b) contacting the target DNA with the donor: RNP complex;

[0289] whereby the nucleotide sequence encoded by the donor polynucleotide is integrated at the specific target locus in the target DNA.
[0290] 16. The method of embodiment 15, wherein the donor polynucleotide comprises single-stranded DNA, optionally comprising chemical modifications.
[0291] 17. The method of embodiment 15, wherein the donor polynucleotide comprises double-stranded DNA, optionally comprising chemical modifications.
[0292] 18. A DNA expression system comprising
   [0293] (a) DNA sequence for a first promoter; and
   [0294] (b) operably linked and heterologous to the first promoter, DNA encoding a first RNA molecule comprising a Cas12a tracrRNA and comprising a restriction endonuclease cleavage site that is suitable for insertion of a sequence coding for a functional RNA moiety; and
   [0295] (c) optionally, a terminator 3′ to and operably linked to the DNA encoding the first RNA molecule.
[0296] 19. The DNA expression system of embodiment 18, wherein the restriction endonuclease cleavage site occurs natively in the DNA encoding the Cas12a tracrRNA.
[0297] 20. The DNA expression system of embodiment 18, wherein the restriction endonuclease cleavage site is artificial.
[0298] 21. The DNA expression system of embodiment 18, further comprising:
   [0299] (d) optionally, a DNA sequence for a second promoter;
   [0300] (e) operably linked and heterologous to the first promoter or the second promoter, DNA encoding a Cas12a crRNA that comprises a 3′ extension capable of hybridizing with a segment of the first RNA molecule; and
   [0301] (f) optionally, a terminator 3′ to and operably linked to the DNA encoding the Cas12a crRNA.
[0302] 22. The DNA expression system of embodiment 21, wherein the first promoter and the DNA encoding the first RNA molecule, and the DNA encoding a Cas12a crRNA that comprises a 3′ extension are contained in a single construct.
[0303] 23. The DNA expression system of embodiment 21, comprising the second promoter, wherein the first promoter and the DNA encoding the first RNA molecule are contained in a first construct, and the second promoter and the DNA encoding a Cas12a crRNA that comprises a 3′ extension are contained in a second construct.
[0304] 24. The DNA expression system of embodiment 23, wherein the first construct and the second construct are provided (a) in a single vector, or (b) in separate vectors.
[0305] 25. The DNA expression system of embodiment 21, wherein the first promoter drives expression of both the DNA encoding the first RNA molecule and the DNA encoding the Cas12a crRNA that comprises a 3′ extension.
[0306] 26. The DNA expression system of any one of embodiments 21 to 25, wherein the Cas12a tracrRNA further comprises a 5′ extension.
[0307] 27. The DNA expression system of any one of embodiments 21 to 26, wherein the Cas12a crRNA that comprises a 3′ extension is capable of complexing with a Cas12a nuclease to form a Cas12a ribonucleoprotein complex.
[0308] 28. The DNA expression system of embodiment 18, further comprising:
   [0309] (d) optionally, a DNA sequence for a second promoter;
   [0310] (e) operably linked and heterologous to the first promoter or the second promoter, DNA encoding a Cas12a crRNA capable of hybridizing with a segment of the first RNA molecule; and
   [0311] (f) optionally, a terminator 3′ to and operably linked to the DNA encoding the Cas12a crRNA.
[0312] 29. The DNA expression system of embodiment 28, wherein the first promoter and the DNA encoding the first RNA molecule, and the DNA encoding a Cas12a crRNA are contained in a single construct.
[0313] 30. The DNA expression system of embodiment 28, comprising the second promoter, wherein the first promoter and the DNA encoding the first RNA molecule are contained in a first construct, and the second promoter and the DNA encoding a Cas12a crRNA are contained in a second construct.
[0314] 31. The DNA expression system of embodiment 30, wherein the first construct and the second construct are provided (a) in a single vector, or (b) in separate vectors.
[0315] 32. The DNA expression system of embodiment 28, wherein the first promoter drives expression of both the DNA encoding the first RNA molecule and the DNA encoding the Cas12a crRNA.
[0316] 33. The DNA expression system of any one of embodiments 28 to 32, wherein the Cas12a tracrRNA further comprises a 5′ extension.
[0317] 34. The DNA expression system of any one of embodiments 28 to 33, wherein the Cas12a crRNA is capable of complexing with a Cas12a nuclease to form a Cas12a ribonucleoprotein complex.
[0318] 35. The DNA expression system of embodiment 27 or embodiment 34, wherein the Cas12a nuclease is:
   [0319] (a) a Cas12a nuclease identified from the genome of a bacterial species selected from the group consisting of Francisella tularensis 1, Prevotella albensis, Lachnospiraceae bacterium MC2017 1, Butyrivibrio proteoclasticus, Peregrinibacteria bacterium GW2011_GWA2_33_10, Parcubacteria bacterium GW2011_GWC2_44_17, Smithella sp. SCADC, Acidaminococcus sp. BV3L6, Lachnospiraceae bacterium MA2020, Candidatus Methanoplasma termitum, Eubacterium eligens, Moraxella bovoculi 237, Leptospira inadai, Lachnospiraceae bacterium ND2006, Porphyromonas crevioricanis 3, Prevotella disiens and Porphyromonas macacae; or
   [0320] (b) a Cas12a nuclease selected from the group consisting of LbCas12a, AsCas12a, FnCas12a, and a deactivated Cas12a nuclease; or
   [0321] (c) a Cas12a nuclease having at least 80% sequence identity with a sequence selected from the group consisting of SEQ ID NOs:11, 107-138, 172, 204-221, and 222; or
   [0322] (d) a Cas12a nuclease variant selected from the group consisting of (1) a variant LbCpf1 that differs from a wild-type LbCpf1 sequence (SEQ ID NO:135) in containing at least one point mutation selected from the group consisting of G309P, Y312F, M4741, D523N, Q531K, C930A, D937N, V954F/Q, M975L, A984E, I994L, T1006K, I1014V, V1055N/D, L1065F/Y, Y1180F, V1209G, I1229L, V801I, Y802I, D850A, E943A, and D1198A; (2) a variant AsCpf1 that differs from a wild-type AsCpf1 sequence (SEQ ID NO:134) in containing at least one point mutation selected from the group consisting of L320P, V980A, Q987N, T1004F/Q, K1035E, T1057K, D1107N, F1117Y, N1291L, D908A, E993A, and D1263A; (3) a variant FnCpf1 that differs from a wild-type FnCpf1 sequence (SEQ ID NO:172) in containing at least one point mutation selected from the group consisting of I339P, L342F, Q588K, F1017Q, K1047E, N1118D, F1128Y, L867I, D917A, E1006A, and D1255A; and (4) a variant ObCsm1 sequence that differs from a wildtype ObCsm1 sequence (SEQ ID NO:137) in containing at least one point mutation selected from the group consisting of K382N, Q393K, S925A, E933N, K943F/Q, K972L, K1064G, P670I, N671I, D727A, E939A, and D1053A.
[0323] 36. The DNA expression system of any one of embodiments 18 to 35, wherein the first promoter has a DNA sequence selected from the group consisting of SEQ ID NOs:16-71 or comprises a promoter selected from the group consisting of a U6 promoter, an H1 promoter, a Rous sarcoma virus (RSV) LTR promoter, a cytomegalovirus (CMV) promoter, an SV40 promoter, a dihydrofolate reductase promoter, a beta-actin promoter, a phosphoglycerol kinase (PGK) promoter, and an EF1a promoter and wherein the Cas12a tracrRNA has a nucleotide sequence comprising a sequence selected from the group consisting of SEQ ID NOs:1, 3, 6, 139-146, 149-169, 223-240, and 241.
[0324] 37. A DNA expression system comprising:
   [0325] (a) DNA sequence for a first promoter; and
   [0326] (b) operably linked and heterologous to the first promoter, a DNA encoding a functional RNA molecule comprising a Cas12a tracrRNA and a functional RNA moiety; and
   [0327] (c) optionally, a terminator 3′ to and operably linked to the DNA encoding a functional RNA molecule.
[0328] 38. The DNA expression system of embodiment 37, further comprising:
   [0329] (d) optionally, a DNA sequence for a second promoter;
   [0330] (e) operably linked and heterologous to the first promoter or the second promoter, a DNA encoding a Cas12a crRNA that comprises a 3′ extension capable of hybridizing with a segment of the functional RNA molecule; and
   [0331] (f) optionally, a terminator 3′ to and operably linked to the DNA encoding a Cas12 crRNA.
[0332] 39. The DNA expression system of embodiment 38, wherein the first promoter and the DNA encoding the functional RNA molecule, and the DNA encoding a Cas12a crRNA that comprises a 3′ extension are contained in a single construct.
[0333] 40. The DNA expression system of embodiment 38, comprising the second promoter, wherein the first promoter and the DNA encoding the functional RNA molecule are contained in a first construct, and the second promoter and the DNA encoding a Cas12a crRNA that comprises a 3′ extension are contained in a second construct.
[0334] 41. The DNA expression system of embodiment 40, wherein the first construct and the second construct are provided (a) in a single vector, or (b) in separate vectors.
[0335] 42. The DNA expression system of embodiment 38, wherein the first promoter drives expression of both the DNA encoding the functional RNA molecule and the DNA encoding the Cas12a crRNA that comprises a 3′ extension.
[0336] 43. The DNA expression system of any one of embodiments 37 to 42, wherein the functional RNA moiety is at least one selected from the group consisting of:
   [0337] (a) a nucleotide sequence for annealing to a donor polynucleotide;
   [0338] (b) a nucleotide sequence for annealing to the crRNA 3′ extension;
   [0339] (c) a terminator sequence;
   [0340] (d) an RNA aptamer;
   [0341] (e) an enzymatically active RNA sequence;
   [0342] (f) a detectable label; and
   [0343] (g) an RNA sequence forming at least partially double-stranded RNA.
[0344] 44. The DNA expression system of any one of embodiments 37 to 42, wherein the functional RNA moiety comprises RNA forming at least partially double-stranded RNA capable of silencing a gene.
[0345] 45. The DNA expression system of any one of embodiments 38 to 44, wherein the Cas12a tracrRNA further comprises a 5′ extension.
[0346] 46. The DNA expression system of any one of embodiments 38 to 45, wherein the Cas12a crRNA is capable of complexing with a Cas12a nuclease to form a Cas12a ribonucleoprotein complex containing the functional molecule.
[0347] 47. The DNA expression system of any one of embodiments 37 to 56, wherein the first promoter has a DNA sequence selected from the group consisting of SEQ ID NOs:16-71 or comprises a promoter selected from the group consisting of a U6 promoter, an H1 promoter, a Rous sarcoma virus (RSV) LTR promoter, a cytomegalovirus (CMV) promoter, an SV40 promoter, a dihydrofolate reductase promoter, a beta-actin promoter, a phosphoglycerol kinase (PGK) promoter, and an EF1a promoter and wherein the Cas12a tracrRNA has a nucleotide sequence comprising a sequence selected from the group consisting of SEQ ID NOs:1, 3, 6, 139-146, 149-169, 223-240, and 241.
[0348] 48. The DNA expression system of embodiment 46 or 47, wherein the Cas12a nuclease is:
   [0349] (a) a Cas12a nuclease identified from the genome of a bacterial species selected from the group consisting of Francisella tularensis 1, Prevotella albensis, Lachnospiraceae bacterium MC2017 1, Butyrivibrio proteoclasticus, Peregrinibacteria bacterium GW2011_GWA2_33_10, Parcubacteria bacterium GW2011_GWC2_44_17, Smithella sp. SCADC, Acidaminococcus sp. BV3L6, Lachnospiraceae bacterium MA2020, Candidatus Methanoplasma termitum, Eubacterium eligens, Moraxella bovoculi 237, Leptospira inadai, Lachnospiraceae bacterium ND2006, Porphyromonas crevioricanis 3, Prevotella disiens and Porphyromonas macacae; or
   [0350] (b) a Cas12a nuclease selected from the group consisting of LbCas12a, AsCas12a, FnCas12a, and a deactivated Cas12a nuclease; or
   [0351] (c) a Cas12a nuclease having at least 80% sequence identity with a sequence selected from the group consisting of SEQ ID NOs:11, 107-138, 172, 204-221, and 222; or
   [0352] (d) a Cas12a nuclease variant selected from the group consisting of (1) a variant LbCpf1 that differs from a wild-type LbCpf1 sequence (SEQ ID NO:135) in containing at least one point mutation selected from the group consisting of G309P, Y312F, M4741, D523N, Q531K, C930A, D937N, V954F/Q, M975L, A984E, I994L, T1006K, I1014V, V1055N/D, L1065F/Y, Y1180F, V1209G, I1229L, V801I, Y802I, D850A, E943A, and D1198A; (2) a variant AsCpf1 that differs from a wild-type AsCpf1 sequence (SEQ ID NO:134) in containing at least one point mutation selected from the group consisting of L320P, V980A, Q987N, T1004F/Q, K1035E, T1057K, D1107N, F1117Y, N1291L, D908A, E993A, and D1263A; (3) a variant FnCpf1 that differs from a wild-type FnCpf1 sequence (SEQ ID NO:172) in containing at least one point mutation selected from the group consisting of I339P, L342F, Q588K, F1017Q, K1047E, N1118D, F1128Y, L867I, D917A, E1006A, and D1255A; and (4) a variant ObCsm1 sequence that differs from a wildtype ObCsm1 sequence (SEQ ID NO:137) in containing at least one point mutation selected from the group consisting of K382N, Q393K, S925A, E933N, K943F/Q, K972L, K1064G, P670I, N671I, D727A, E939A, and D1053A.
[0353] 49. An engineered system comprising:
   [0354] (a) a Cas12a nuclease; and
   [0355] (b) at least one engineered Cas12a crRNA, or a polynucleotide encoding the engineered Cas12a crRNA, wherein the engineered Cas12a crRNA comprises
      [0356] (i) at least one direct repeat sequence or fragment thereof that is capable of associating with the Cas12a nuclease, and
      [0357] (ii) a spacer sequence that is designed to hybridize with a target sequence in a eukaryotic cell, wherein the at least one direct repeat sequence or fragment thereof is adjacent to and 5′ to the spacer sequence; and
   [0358] (c) a Cas12a tracrRNA comprising a nucleotide sequence that has at least 50% complementarity with, the nucleotide sequence of the at least one direct repeat of the engineered Cas12a crRNA.
[0359] 50. An engineered system comprising:
   [0360] (a) a Cas12a nuclease; and
   [0361] (b) at least one engineered Cas12a crRNA, or a polynucleotide encoding the engineered Cas12a crRNA, wherein the engineered Cas12a crRNA comprises
      [0362] (i) at least one direct repeat sequence or fragment thereof that is capable of associating with the Cas12a nuclease, and
      [0363] (ii) a spacer sequence that is designed to hybridize with a target sequence in a eukaryotic cell, wherein the at least one direct repeat sequence or fragment thereof is adjacent to and 5′ to the spacer sequence; and
   [0364] (c) a Cas12a tracrRNA comprising a naturally occurring putative Cas12a tracrRNA sequence that is identified from the same genomic region as the Cas12a nuclease by at least the following steps: (i) identifying in the genomic region flanking the DNA encoding the Cas12a nuclease at least one nucleotide sequence that comprises a CRISPR array including direct repeats, and (ii) identifying as a putative Cas12a tracrRNA at least one nucleotide sequence in either the sense or antisense direction in the genomic region flanking the DNA encoding the Cas12a nuclease, wherein the putative Cas12a tracrRNA has a nucleotide sequence that has at least 50% complementarity with, the nucleotide sequence of the direct repeat.
[0365] 51. The engineered system of embodiment 49 or embodiment 50, wherein the engineered Cas12a crRNA, or the polynucleotide encoding the engineered Cas12a crRNA, further comprises at least one direct repeat sequence or fragment thereof capable of associating with the Cas12a nuclease adjacent to and 3′ to the spacer sequence.
[0366] 52. The engineered system of embodiment 49 or embodiment 50, wherein the engineered Cas12a crRNA further comprises a 3′ extension adjacent to the spacer sequence.
[0367] 53. The engineered system of embodiment 52, wherein the 3′ extension comprises nucleotides that when base-paired form about one helical turn.
[0368] 54. The engineered system of embodiment 52, wherein the 3′ extension comprises at least 10 contiguous nucleotides.
[0369] 55. The engineered system of any one of embodiments 52, 53, and 54, wherein the Cas12a tracrRNA has a nucleotide sequence having sufficient complementarity to the engineered Cas12a crRNA's 3′ extension to allow hybridization between the tracrRNA and the engineered Cas12a crRNA.
[0370] 56. An engineered system comprising:
   [0371] (a) one or more nucleotide sequences encoding a Cas12a nuclease; and
   [0372] (b) one or more nucleotide sequences encoding at least one engineered Cas12a crRNA that is designed to form a complex with the Cas12a nuclease and that comprises a spacer sequence designed to hybridize with a target sequence in a eukaryotic cell; and
   [0373] (c) one or more nucleotide sequences encoding at least one Cas12a tracrRNA.
[0374] 57. An engineered system comprising:
   [0375] (a) a Cas12a nuclease, or one or more nucleotide sequences encoding the Cas12a nuclease; and
   [0376] (b) at least one engineered Cas12a crRNA designed to form a complex with the Cas12a nuclease and comprising a spacer sequence designed to hybridize with a target sequence in a eukaryotic cell, or one or more nucleotide sequences encoding the at least one engineered Cas12a crRNA polynucleotide; and
   [0377] (c) at least one tracrRNA, or one or more nucleotide sequences encoding the at least one Cas12a tracrRNA.
[0378] 58. The engineered system of embodiment 56 or embodiment 57, wherein the at least one engineered Cas12a crRNA, or a polynucleotide encoding the at least one engineered Cas12a crRNA, further comprises at least one direct repeat sequence or fragment thereof that is capable of associating with the Cas12a nuclease and is adjacent to and 5′ to the spacer sequence.
[0379] 59. The engineered system of embodiment 56 or embodiment 57, wherein the engineered Cas12a crRNA, or a polynucleotide encoding the engineered Cas12a crRNA, further comprises at least one direct repeat sequence or fragment thereof capable of associating with the Cas12a nuclease adjacent to and 3′ to the spacer sequence.
[0380] 60. The engineered system of embodiment 56 or embodiment 57, wherein the engineered Cas12a crRNA further comprises a 3′ extension adjacent to the spacer sequence.
[0381] 61. The engineered system of embodiment 60, wherein the 3′ extension comprises nucleotides that when base-paired form about one helical turn.
[0382] 62. The engineered system of embodiment 60, wherein the 3′ extension comprises at least 10 contiguous nucleotides.
[0383] 63. The engineered system of any one of embodiments 60, 61, and 62, wherein the Cas12a tracrRNA has a nucleotide sequence having sufficient complementarity to the engineered Cas12a crRNA's 3′ extension to allow hybridization between the Cas12a tracrRNA and the engineered Cas12a crRNA.
[0384] 64. An engineered system comprising one or more vectors comprising:
   [0385] (a) a first regulatory element that is heterologous to and operably linked to one or more nucleotide sequences encoding a Cas12a nuclease; and
   [0386] (b) a second regulatory element that is heterologous to and operably linked to one or more nucleotide sequences encoding at least one engineered Cas12a crRNA that is designed to form a complex with the Cas12a nuclease and that comprises a spacer sequence designed to hybridize with a target sequence in a eukaryotic cell; and
   [0387] (c) a third regulatory element that is heterologous to and operably linked to one or more nucleotide sequences encoding at least one Cas12a tracrRNA;
[0388] wherein components (a) and (b) and (c) are located on the same vector or on different vectors of the system.
[0389] 65. The engineered system of embodiment 64, wherein the first regulatory element, the second regulatory element, and the third regulatory element each comprise a promoter that is functional in the eukaryotic cell.
[0390] 66. The engineered system of embodiment 65, wherein the first regulatory element, the second regulatory element, and the third regulatory element each comprise a promoter selected from the group consisting of pol III promoters, pol II promoters, and pol I promoters.
[0391] 67. The engineered system of embodiment 69, wherein the first regulatory element, the second regulatory element, and the third regulatory element each comprise a promoter selected from the group consisting of a U6 promoter, an H1 promoter, a Rous sarcoma virus (RSV) LTR promoter, a cytomegalovirus (CMV) promoter, an SV40 promoter, a dihydrofolate reductase promoter, a beta-actin promoter, a phosphoglycerol kinase (PGK) promoter, an EF1a promoter.
[0392] 68. The engineered system of embodiment 64, wherein the eukaryotic cell is a plant cell, and wherein the third regulatory element comprises a promoter having a nucleotide sequence selected from the group consisting of SEQ ID NOs:16-71.
[0393] 69. The engineered system of any one of embodiments 64-68, wherein the at least one Cas12a tracrRNA is at least one Cas12a tracrRNA having a nucleotide sequence comprising a sequence selected from the group consisting of SEQ ID NOs:1, 3, 6, 139-146, 149-169, 223-240, and 241.
[0394] 70. An engineered system comprising one or more vectors comprising:
   [0395] (a) a first expression cassette comprising at least a first promoter that is heterologous to and operably linked to one or more nucleotide sequences encoding a Cas12a nuclease and—optionally—a first transcription terminator sequence; and
   [0396] (b) a second expression cassette comprising at least a second promoter that is heterologous to operably linked to one or more nucleotide sequences encoding at least one engineered Cas12a crRNA that is designed to form a complex with the Cas12a nuclease and that comprises a spacer sequence designed to hybridize with a target sequence in a eukaryotic cell and—optionally—a second transcription terminator sequence; and
   [0397] (c) a third expression cassette comprising at least a third promoter that is heterologous to operably linked to one or more nucleotide sequences encoding at least one Cas12a tracrRNA and—optionally—a third transcription terminator sequence,
   [0398] wherein components (a) and (b) and (c) are located on the same vector or on different vectors of the system.
[0399] 71. The engineered system of embodiment 70, wherein the first promoter, the second promoter, and the third promoter are each a promoter that is functional in the eukaryotic cell, and wherein the first transcription terminator, the second transcription terminator, and the third transcription terminator are each a transcription terminator that is functional in the eukaryotic cell.
[0400] 72. The engineered system of embodiment 70, wherein the first promoter, the second promoter, and the third promoter are each a promoter selected from the group consisting of pol III promoters, pol II promoters, and pol I promoters.
[0401] 73. The engineered system of embodiment 70, wherein the first promoter, the second promoter, and the third promoter are each a promoter selected from the group consisting of a U6 promoter, an H1 promoter, a Rous sarcoma virus (RSV) LTR promoter, a cytomegalovirus (CMV) promoter, an SV40 promoter, a dihydrofolate reductase promoter, a beta-actin promoter, a phosphoglycerol kinase (PGK) promoter, an EF1a promoter.
[0402] 74. The engineered system of embodiment 70, wherein the first promoter, the second promoter, and the third promoter are each a promoter with a nucleotide sequence selected from the group consisting of SEQ ID NOs:16-71.
[0403] 75. The engineered system of embodiment 70, wherein the first transcription terminator, the second transcription terminator, and the third transcription terminator are each selected from the group consisting of a U6 poly-T terminator, an SV40 terminator, an hGH terminator, a BGH terminator, an rbGlob terminator, a synthetic terminator functional in a eukaryotic cell, a 3′ element from an Agrobacterium sp. gene, a 3′ element from a non-human animal gene, a 3′ element from a human gene, and a 3′ element from a plant gene, wherein the 3′ element terminate transcription of an RNA transcript located immediately 5′ to the 3′ element.
[0404] 76. The engineered system of embodiment 70, wherein the first transcription terminator, the second transcription terminator, and the third transcription terminator are each a transcription terminator having a sequence selected from the group consisting of SEQ ID NOs:72-99, and 100.
[0405] 77. The engineered system of any one of embodiments 49-76, wherein the eukaryotic cell is a non-human animal cell, a human cell, a plant cell, or a fungal cell.
[0406] 78. The engineered system of any one of embodiments 49-77, wherein the eukaryotic cell is in vitro, ex vivo, or in vivo.
[0407] 79. The engineered system of any one of embodiments 49-78, wherein the Cas12a nuclease is:
   [0408] (a) a Cas12a nuclease identified from the genome of a bacterial species selected from the group consisting of Francisella tularensis 1, Prevotella albensis, Lachnospiraceae bacterium MC2017 1, Butyrivibrio proteoclasticus, Peregrinibacteria bacterium GW2011_GWA2_33_10, Parcubacteria bacterium GW2011_GWC2_44_17, Smithella sp. SCADC, Acidaminococcus sp. BV3L6, Lachnospiraceae bacterium MA2020, Candidatus Methanoplasma termitum, Eubacterium eligens, Moraxella bovoculi 237, Leptospira inadai, Lachnospiraceae bacterium ND2006, Porphyromonas crevioricanis 3, Prevotella disiens and Porphyromonas macacae; or
   [0409] (b) a Cas12a nuclease selected from the group consisting of LbCas12a, AsCas12a, FnCas12a, and a deactivated Cas12a nuclease; or
   [0410] (c) a Cas12a nuclease having at least 80% sequence identity with a sequence selected from the group consisting of SEQ ID NOs:11, 107-138, 172, 204-221, and 222; or
   [0411] (d) a Cas12a nuclease variant selected from the group consisting of (1) a variant LbCpf1 that differs from a wild-type LbCpf1 sequence (SEQ ID NO:135) in containing at least one point mutation selected from the group consisting of G309P, Y312F, M4741, D523N, Q531K, C930A, D937N, V954F/Q, M975L, A984E, I994L, T1006K, I1014V, V1055N/D, L1065F/Y, Y1180F, V1209G, I1229L, V801I, Y802I, D850A, E943A, and D1198A; (2) a variant AsCpf1 that differs from a wild-type AsCpf1 sequence (SEQ ID NO:134) in containing at least one point mutation selected from the group consisting of L320P, V980A, Q987N, T1004F/Q, K1035E, T1057K, D1107N, F1117Y, N1291L, D908A, E993A, and D1263A; and (3) a variant FnCpf1 that differs from a wild-type FnCpf1 sequence (SEQ ID NO:172) in containing at least one point mutation selected from the group consisting of I339P, L342F, Q588K, F1017Q, K1047E, N1118D, F1128Y, L867I, D917A, E1006A, and D1255A.
[0412] 80. The engineered system of any one of embodiments 49-79, wherein the Cas12a nuclease comprises one or more of:
   [0413] (a) a localization signal;
   [0414] (b) a detectable label;
   [0415] (c) a cell-penetrating peptide;
   [0416] (d) an endosomal escape peptide; and
   [0417] (e) and affinity tag.
[0418] 81. The engineered system of any one of embodiments 49-80, wherein the at least one Cas12a tracrRNA has a nucleotide sequence selected from the group consisting of SEQ ID NOs:1, 3, 6, 139-146, 149-169, 223-240, and 241.
[0419] 82. The engineered system of any one of embodiments 49-81, wherein the genomic sequence encoding the Cas12a nuclease and the genomic sequence encoding the Cas12a tracrRNA occur naturally within the same region in a genome.
[0420] 83. The engineered system of any one of embodiments 49, 50, 56, 57, 64, and 68, wherein the target sequence is located 3′ of a Protospacer Adjacent Motif (PAM) and the PAM sequence is TTN, where N is A/C/G or T and the Cas12a nuclease is FnCpf1, or the PAM sequence is TTTV, where V is A/C or G and the Cas12a nuclease is PaCpf1p, LbCpf1 or AsCpf1.
[0421] 84. The engineered system of any one of embodiments 49, 56, 57, 64, and 68, wherein the Cas12a tracrRNA is a putative Cas12a tracrRNA that is identified from the same genomic region as the Cas12a nuclease by at least the following steps:
   [0422] (a) identifying in the genomic region flanking the DNA encoding the Cas12a nuclease at least one nucleotide sequence that comprises a CRISPR array including direct repeats;
   [0423] (b) identifying as a putative Cas12a tracrRNA at least one nucleotide sequence in either the sense or antisense direction in the genomic region flanking the DNA encoding the Cas12a nuclease, wherein the putative Cas12a tracrRNA has a nucleotide sequence that has at least 50% complementarity with, the nucleotide sequence of the direct repeat.
[0424] 85. The engineered system of any one of embodiments 49, 50, 56, 57, 64, and 68, wherein the Cas12a tracrRNA is provided:
   [0425] (a) as DNA encoding a first RNA molecule comprising the Cas12a tracrRNA and comprising a restriction endonuclease cleavage site that is suitable for insertion of a sequence coding for a functional RNA moiety; or
   [0426] (b) as a functional RNA molecule comprising the Cas12a tracrRNA and a functional RNA moiety, or as a polynucleotide encoding the functional RNA molecule; or
   [0427] (c) by the DNA expression system of embodiment 18; or
   [0428] (d) by the DNA expression system of embodiment 37.
[0429] 86. The engineered system of any one of embodiments 49, 50, 56, 57, 64, and 68, wherein the Cas12a tracrRNA is provided as DNA encoding a first RNA molecule comprising the Cas12a tracrRNA and comprising a restriction endonuclease cleavage site that is suitable for insertion of a sequence coding for a functional RNA moiety, and wherein the functional RNA moiety is at least one selected from the group consisting of:
   [0430] (a) a nucleotide sequence for annealing to a donor polynucleotide;
   [0431] (b) a nucleotide sequence for annealing to the crRNA 3′ extension;
   [0432] (c) a terminator sequence;
   [0433] (d) an RNA aptamer;
   [0434] (e) an enzymatically active RNA sequence;
   [0435] (f) a detectable label; and
   [0436] (g) an RNA sequence forming at least partially double-stranded RNA.
[0437] 87. The engineered system of any one of embodiments 49, 50, 56, 57, 64, and 68, wherein the Cas12a tracrRNA is provided as DNA encoding a first RNA molecule comprising the Cas12a tracrRNA and comprising a restriction endonuclease cleavage site that is suitable for insertion of a sequence coding for a functional RNA moiety, wherein the functional RNA moiety comprises RNA forming at least partially double-stranded RNA capable of silencing a gene.
[0438] 88. The engineered system of any one of embodiments 49, 50, 56, 57, 64, and 68, wherein the Cas12a tracrRNA is provided as DNA encoding a first RNA molecule comprising the Cas12a tracrRNA and comprising a restriction endonuclease cleavage site that is suitable for insertion of a sequence coding for a functional RNA moiety, wherein the functional RNA moiety comprises an RNA sequence for annealing to a donor polynucleotide, and wherein the composition further comprises the donor polynucleotide.
[0439] 89. The engineered system of any one of embodiments 49, 50, 56, 57, 64, and 68, wherein the Cas12a tracrRNA is provided as a functional RNA molecule comprising the Cas12a tracrRNA and a functional RNA moiety, or as a polynucleotide encoding the functional RNA molecule, and wherein the functional RNA moiety is at least one selected from the group consisting of:
   [0440] (a) a nucleotide sequence for annealing to a donor polynucleotide;
   [0441] (b) a nucleotide sequence for annealing to the crRNA 3′ extension;
   [0442] (c) a terminator sequence;
   [0443] (d) an RNA aptamer;
   [0444] (e) an enzymatically active RNA sequence;
   [0445] (f) a detectable label; and
   [0446] (g) an RNA sequence forming at least partially double-stranded RNA.
[0447] 90. The engineered system of any one of embodiments 49, 50, 56, 57, 64, and 68, wherein the Cas12a tracrRNA is provided as a functional RNA molecule comprising the Cas12a tracrRNA and a functional RNA moiety, or as a polynucleotide encoding the functional RNA molecule, and wherein the functional RNA moiety comprises RNA forming at least partially double-stranded RNA capable of silencing a gene.
[0448] 91. The engineered system of any one of embodiments 49, 50, 56, 57, 64, and 68, wherein the Cas12a tracrRNA is provided as a functional RNA molecule comprising the Cas12a tracrRNA and a functional RNA moiety, or as a polynucleotide encoding the functional RNA molecule, wherein the functional RNA moiety comprises an RNA sequence for annealing to a donor polynucleotide, and wherein the system further comprises the donor polynucleotide.
[0449] 92. The engineered system of any one of embodiments 49, 50, 56, 57, 64, and 68, wherein the Cas12a tracrRNA is provided in a molar excess, relative to the amount of Cas12a nuclease.
[0450] 93. The engineered system of any one of embodiments 49, 50, 56, 57, 64, and 68, wherein the Cas12a tracrRNA is provided in a molar amount that is at least 10-fold greater than the molar amount of the Cas12a nuclease.
[0451] 94. A delivery particle comprising the engineered system of any one of embodiments 49, 50, 56, 57, 64, and 68.
[0452] 95. The delivery particle of embodiment 94, wherein the Cas12a nuclease is complexed with the engineered Cas12a crRNA polynucleotide.
[0453] 96. The delivery particle of embodiment 94, wherein the Cas12a tracrRNA is present in a molar excess, relative to the amount of Cas12a nuclease.
[0454] 97. The delivery particle of embodiment 94, wherein the Cas12a tracrRNA is present in a molar amount that is at least 10-fold greater than the molar amount of the Cas12a nuclease.
[0455] 98. A delivery liquid comprising the engineered system of any one of embodiments 49, 50, 56, 57, 64, and 68.
[0456] 99. The delivery liquid of embodiment 98, wherein the Cas12a nuclease is complexed with the engineered Cas12a crRNA polynucleotide.
[0457] 100. The delivery liquid of embodiment 98, wherein the Cas12a tracrRNA is present in a molar excess, relative to the amount of Cas12a nuclease.
[0458] 101. The delivery liquid of embodiment 98, wherein the Cas12a tracrRNA is present in a molar amount that is at least 10-fold greater than the molar amount of the Cas12a nuclease.
[0459] 102. A method of modifying a target sequence in a locus of interest of a eukaryotic cell comprising delivering the engineered system according to any one of embodiments 49, 50, 56, 57, 64, and 68 to the locus of interest, wherein the spacer sequence hybridizes with the target sequence, whereby modification of the locus of interest occurs.
[0460] 103. The method of embodiment 102, wherein the locus of interest is within a eukaryotic cell.
[0461] 104. The method of embodiment 102, wherein the eukaryotic cell is a plant cell.
[0462] 105. The method of embodiment 102, wherein the eukaryotic cell is a non-human animal cell or a human cell.
[0463] 106. The method of embodiment 102, wherein the engineered system or a component thereof is delivered via delivery particles, delivery vesicles, delivery liquids, or one or more viral or bacterial vectors.
[0464] 107. The method of embodiment 102, wherein the engineered system or a component thereof is delivered via delivery particles comprising at least one selected from the group consisting of a lipid, a sugar, a metal, or a protein.
[0465] 108. The method of embodiment 102, wherein the engineered system or a component thereof is delivered via delivery exosomes or liposomes.
[0466] 109. The method of embodiment 102, wherein the engineered system or a component thereof is delivered via at least one viral vector selected from the group consisting of adenoviruses, lentiviruses, adeno-associated viruses, retroviruses, geminiviruses, begomoviruses, tobamoviruses, potex viruses, comoviruses, wheat streak mosaic virus, barley stripe mosaic virus, bean yellow dwarf virus, bean pod mottle virus, cabbage leaf curl virus, beet curly top virus, tobacco yellow dwarf virus, tobacco rattle virus, potato virus X, and cowpea mosaic virus.
[0467] 110. The method of embodiment 102, wherein the system or a component thereof is delivered via at least one bacterial vector capable of transforming a plant cell and selected from the group consisting of Agrobacterium sp., Rhizobium sp., Sinorhizobium (Ensifer) sp., Mesorhizobium sp., Bradyrhizobium sp., Azobacter sp., and Phyllobacterium sp.
[0468] 111. The method of embodiment 102, wherein the Cas12a nuclease is:
   [0469] (a) a Cas12a nuclease identified from the genome of a bacterial species selected from the group consisting of Francisella tularensis 1, Prevotella albensis, Lachnospiraceae bacterium MC2017 1, Butyrivibrio proteoclasticus, Peregrinibacteria bacterium GW2011_GWA2_33_10, Parcubacteria bacterium GW2011_GWC2_44_17, Smithella sp. SCADC, Acidaminococcus sp. BV3L6, Lachnospiraceae bacterium MA2020, Candidatus Methanoplasma termitum, Eubacterium eligens, Moraxella bovoculi 237, Leptospira inadai, Lachnospiraceae bacterium ND2006, Porphyromonas crevioricanis 3, Prevotella disiens and Porphyromonas macacae; or
   [0470] (b) a Cas12a nuclease selected from the group consisting of LbCas12a, AsCas12a, FnCas12a, and a deactivated Cas12a nuclease; or
   [0471] (c) a Cas12a nuclease having at least 80% sequence identity with a sequence selected from the group consisting of SEQ ID NOs:11, 107-138, 172, 204-221, and 222; or
   [0472] (d) a Cas12a nuclease variant selected from the group consisting of (1) a variant LbCpf1 that differs from a wild-type LbCpf1 sequence (SEQ ID NO:135) in containing at least one point mutation selected from the group consisting of G309P, Y312F, M4741, D523N, Q531K, C930A, D937N, V954F/Q, M975L, A984E, I994L, T1006K, I1014V, V1055N/D, L1065F/Y, Y1180F, V1209G, I1229L, V801I, Y802I, D850A, E943A, and D1198A; (2) a variant AsCpf1 that differs from a wild-type AsCpf1 sequence (SEQ ID NO:134) in containing at least one point mutation selected from the group consisting of L320P, V980A, Q987N, T1004F/Q, K1035E, T1057K, D1107N, F1117Y, N1291L, D908A, E993A, and D1263A; (3) a variant FnCpf1 that differs from a wild-type FnCpf1 sequence (SEQ ID NO:172) in containing at least one point mutation selected from the group consisting of I339P, L342F, Q588K, F1017Q, K1047E, N1118D, F1128Y, L867I, D917A, E1006A, and D1255A; and (4) a variant ObCsm1 sequence that differs from a wildtype ObCsm1 sequence (SEQ ID NO:137) in containing at least one point mutation selected from the group consisting of K382N, Q393K, S925A, E933N, K943F/Q, K972L, K1064G, P670I, N671I, D727A, E939A, and D1053A.
[0473] 112. The method of embodiment 102, wherein the Cas12a nuclease comprises one or more of:
   [0474] (a) a localization signal;
   [0475] (b) a detectable label;
   [0476] (c) a cell-penetrating peptide;
   [0477] (d) an endosomal escape peptide; and
   [0478] (e) and affinity tag.
[0479] 113. The method of embodiment 102, wherein the Cas12a tracrRNA has a nucleotide sequence comprising a sequence selected from the group consisting of SEQ ID NOs:1, 3, 6, 139-146, 149-169, 223-240, and 241.
[0480] 114. The method of embodiment 102, wherein the tracrRNA is a putative Cas12a tracrRNA that is identified from the same genomic region as the Cas12a nuclease by at least the following steps:
   [0481] (a) identifying in the genomic region flanking the DNA encoding the Cas12a nuclease at least one nucleotide sequence that comprises a CRISPR array including direct repeats;
   [0482] (b) identifying as a putative Cas12a tracrRNA at least one nucleotide sequence in either the sense or antisense direction in the genomic region flanking the DNA encoding the Cas12a nuclease, wherein the putative Cas12a tracrRNA has a nucleotide sequence that has at least 50% complementarity with, the nucleotide sequence of the direct repeat.
[0483] 115. The method of embodiment 102, wherein the eukaryotic cell comprises a cell of a cell line or a cell of a multicellular organism, and wherein the locus of interest comprises a locus of interest in the genome of the eukaryotic cell.
[0484] 116. The method of embodiment 102, wherein the eukaryotic cell is in vitro, ex vivo, or in vivo.
[0485] 117. The method of embodiment 102, wherein the eukaryotic cell comprises a non-human animal or human stem cell or a non-human animal or human stem cell line.
[0486] 118. The method of embodiment 102, wherein the locus of interest is within a eukaryotic DNA molecule in vitro.
[0487] 119. The method of embodiment 102, wherein the eukaryotic cell comprises a plant cell, and wherein the modification of the locus of interest is correlated with a modified trait in a plant comprising cells containing the modification of the locus of interest.
[0488] 120. The method of embodiment 119, wherein the method further comprises obtaining, growing, or regenerating a plant from the plant cell, wherein the plant comprises cells containing the modification of the locus of interest, and wherein the plant exhibits the modified trait effected by the modification of the locus of interest.
[0489] 121. The method of embodiment 102, wherein the eukaryotic cell comprises a plant cell, and the method further comprises identifying a trait of interest in a plant obtained, grown, or regenerated from the plant cell, wherein the trait of interest is effected by the modification of the locus of interest.
[0490] 122. The method of embodiment 121, further comprising:
   [0491] (a) introducing a nucleotide sequence comprising the locus of interest into a plant cell, a plant cell line, or a plant germplasm, and generating from the plant cell, the plant cell line, or the plant germplasm a plant comprising cells containing the nucleotide sequence comprising the locus of interest; or
   [0492] (b) introducing the modified locus of interest into a plant cell, a plant cell line, or a plant germplasm, and generating from the plant cell, the plant cell line, or the plant germplasm a plant comprising cells containing the modified locus of interest; or
   [0493] (c) modifying expression of the locus of interest in a plant cell, a plant cell line, or a plant germplasm, and generating from the plant cell, the plant cell line, or the plant germplasm a plant comprising cells containing the locus of interest having modified expression; or
   [0494] (d) deleting the locus of interest or an endogenous nucleotide sequence comprising the locus of interest in a plant cell, and generating from the plant cell, the plant cell line, or the plant germplasm a plant comprising cells in which the locus of interest or the endogenous nucleotide sequence comprising the locus of interest has been deleted.
[0495] 123. A method of editing a genetic locus with a Cas12a nuclease, comprising contacting DNA that comprises the genetic locus with:
   [0496] (a) a Cas12a nuclease; and
   [0497] (b) an engineered Cas12a crRNA that includes a spacer sequence that is designed to hybridize with a target sequence in the genetic locus; and
   [0498] (c) a Cas12a tracrRNA, thereby editing the genetic locus;
      [0499] wherein the efficiency of editing of the genetic locus is increased compared to a control method in which the DNA that comprises the genetic locus is contacted with the Cas12a nuclease and the Cas12a crRNA, but not the Cas12a tracrRNA.
[0500] 124. The method of embodiment 123, wherein the Cas12a nuclease and the engineered Cas12a crRNA are provided as a ribonucleoprotein complex.
[0501] 125. The method of embodiment 123, wherein the Cas12a nuclease is provided as a polynucleotide encoding the Cas12a nuclease.
[0502] 126. The method of embodiment 123, wherein the Cas12a tracrRNA is provided:
   [0503] (a) as DNA encoding a first RNA molecule comprising the Cas12a tracrRNA and comprising a restriction endonuclease cleavage site that is suitable for insertion of a sequence coding for a functional RNA moiety; or
   [0504] (b) as a functional RNA molecule comprising the Cas12a tracrRNA and a functional RNA moiety, or as a polynucleotide encoding the functional RNA molecule; or
   [0505] (c) by the DNA expression system of embodiment 18; or
   [0506] (d) by the DNA expression system of embodiment 37.
[0507] 127. The method of embodiment 123, wherein the DNA that comprises the genetic locus is genomic DNA.
[0508] 128. The method of embodiment 123, wherein the DNA that comprises the genetic locus is in a eukaryotic DNA molecule in vitro.
[0509] 129. The method of embodiment 123, wherein the DNA that comprises the genetic locus is in a eukaryotic cell.
[0510] 130. The method of embodiment 129, wherein the eukaryotic cell is a cell of a non-human animal, an invertebrate, a vertebrate, a mollusk, an arthropod, an insect, a fish, a reptile, an amphibian, a bird, a mammal, a primate, a non-human primate, a human, a plant, or a fungus.
[0511] 131. The method of embodiment 129, wherein the eukaryotic cell comprises a cell of a cell line or a cell of a multicellular organism, and wherein the genetic locus to be modified comprises a locus of interest in the genome of the eukaryotic cell.
[0512] 132. The method of embodiment 129, wherein the eukaryotic cell is in vitro, ex vivo, or in vivo.
[0513] 133. The method of embodiment 129, wherein the eukaryotic cell comprises a non-human animal or human stem cell or a non-human animal or human stem cell line.
[0514] 134. The method of embodiment 123, wherein the Cas12a tracrRNA is a putative tracrRNA.
[0515] 135. The method of embodiment 134, wherein the putative Cas12a tracrRNA is identified from the same genomic region as the Cas12a nuclease by at least the following steps:
   [0516] (a) identifying in the genomic region flanking the DNA encoding the Cas12a nuclease at least one nucleotide sequence that comprises a CRISPR array including direct repeats;
   [0517] (b) identifying as a putative Cas12a tracrRNA at least one nucleotide sequence in either the sense or antisense direction in the genomic region flanking the DNA encoding the Cas12a nuclease, wherein the putative Cas12a tracrRNA has a nucleotide sequence that has at least 50% complementarity with, the nucleotide sequence of the direct repeat.
[0518] 136. The method of embodiment 123, wherein the Cas12a tracrRNA is provided in a molar excess, relative to the Cas12a nuclease.
[0519] 137. The method of embodiment 123, wherein the Cas12a tracrRNA is provided in a molar amount that is at least 10-fold greater than the molar amount of the Cas12a nuclease.
[0520] 138. The method of embodiment 123, wherein the engineered Cas12a crRNA, or a polynucleotide encoding the engineered Cas12a crRNA, further comprises at least one direct repeat sequence or fragment thereof capable of associating with the Cas12a nuclease adjacent to and 3′ to the spacer sequence.
[0521] 139. The method of embodiment 123, wherein the engineered Cas12a crRNA further comprises a 3′ extension adjacent to the spacer sequence.
[0522] 140. The method of embodiment 123, wherein the 3′ extension comprises nucleotides that when base-paired form about one helical turn.
[0523] 141. The method of embodiment 123, wherein the 3′ extension comprises at least 10 contiguous nucleotides.
[0524] 142. The method of embodiment 123, wherein the Cas12a tracrRNA has a nucleotide sequence having sufficient complementarity to the engineered Cas12a crRNA's 3′ extension to allow hybridization between the tracrRNA and the engineered Cas12a crRNA.
[0525] 143. The method of embodiment 123, wherein the editing of the genetic locus is effecting an indel in the genetic locus.
[0526] 144. The method of embodiment 123, wherein the editing of the genetic locus is effecting non-homologous end joining (NHEJ) in the genetic locus.
[0527] 145. The method of embodiment 123, wherein the editing of the genetic locus is effecting homology-dependent repair (HDR) in the genetic locus.
[0528] 146. A composition for modifying a genetic locus in a eukaryotic cell, comprising:
   [0529] (a) a eukaryotic cell containing a genetic locus to be modified; and
   [0530] (b) a Cas12a nuclease, or a polynucleotide encoding the Cas12a nuclease; and
   [0531] (c) an engineered Cas12a crRNA that includes a spacer sequence corresponding to a specific sequence in the genetic locus, or a polynucleotide encoding the Cas12a crRNA; and
   [0532] (d) a Cas12a tracrRNA, or a polynucleotide encoding the Cas12a tracrRNA, wherein the Cas12a tracrRNA is provided in molar excess relative to the Cas12a nuclease.
[0533] 147. A composition for modifying a genetic locus in a eukaryotic cell, comprising:
   [0534] (a) a Cas12a nuclease, or a polynucleotide encoding the Cas12a nuclease;
   [0535] (b) an engineered Cas12a crRNA that includes a spacer sequence corresponding to a specific sequence in the genetic locus, or a polynucleotide encoding the Cas12a crRNA; and
   [0536] (c) a Cas12a tracrRNA, or a polynucleotide encoding the Cas12a tracrRNA, optionally wherein the Cas12a tracrRNA is provided in molar excess relative to the Cas12a nuclease.
[0537] 148. The composition of embodiment 146 or 147, wherein the Cas12a tracrRNA is identified from the same genomic region as the Cas12a nuclease by at least the following steps:
   [0538] (a) identifying in the genomic region flanking the DNA encoding the Cas12a nuclease at least one nucleotide sequence that comprises a CRISPR array including direct repeats;
   [0539] (b) identifying as a putative Cas12a tracrRNA at least one nucleotide sequence in either the sense or antisense direction in the genomic region flanking the DNA encoding the Cas12a nuclease, wherein the putative Cas12a tracrRNA has a nucleotide sequence that has at least 50% complementarity with, the nucleotide sequence of the direct repeat.
[0540] 149. The composition of embodiment 146, 147, or 148, wherein the Cas12a tracrRNA is present in a molar excess, relative to the Cas12a nuclease.
[0541] 150. The composition of any one of embodiments 146 to 149, wherein the Cas12a tracrRNA is present in a molar amount that is at least 10-fold greater than the molar amount of the Cas12a nuclease.
[0542] 151. The composition of embodiment 146, wherein the eukaryotic cell is a cell of a non-human animal, an invertebrate, a vertebrate, a mollusk, an arthropod, an insect, a fish, a reptile, an amphibian, a bird, a mammal, a primate, a non-human primate, a human, a plant, or a fungus.
[0543] 152. The composition of any one of embodiments 146 to 151, wherein the eukaryotic cell comprises a cell of a cell line or a cell of a multicellular organism, and wherein the genetic locus to be modified comprises a locus of interest in the genome of the eukaryotic cell.
[0544] 153. The composition of any one of embodiments 146 to 152, wherein the eukaryotic cell is in vitro, ex vivo, or in vivo.
[0545] 154. The composition of any one of embodiments 146 to 153, wherein the eukaryotic cell comprises a non-human animal or human stem cell or a non-human animal or human stem cell line.
[0546] 155. The composition of any one of embodiments 146 to 154, wherein the Cas12a tracrRNA is provided:
   [0547] (a) as DNA encoding a first RNA molecule comprising the Cas12a tracrRNA and comprising a restriction endonuclease cleavage site that is suitable for insertion of a sequence coding for a functional RNA moiety; or
   [0548] (b) as a functional RNA molecule comprising the Cas12a tracrRNA and a functional RNA moiety, or as a polynucleotide encoding the functional RNA molecule; or
   [0549] (c) by the DNA expression system of embodiment 18; or
   [0550] (d) by the DNA expression system of embodiment 37.
[0551] 156. The composition of any one of embodiments 146 to 155, wherein the Cas12a tracrRNA is provided as DNA encoding a first RNA molecule comprising the Cas12a tracrRNA and comprising a restriction endonuclease cleavage site that is suitable for insertion of a sequence coding for a functional RNA moiety, and wherein the functional RNA moiety is at least one selected from the group consisting of:
   [0552] (a) a nucleotide sequence for annealing to a donor polynucleotide;
   [0553] (b) a nucleotide sequence for annealing to the crRNA 3′ extension;
   [0554] (c) a terminator sequence;
   [0555] (d) an RNA aptamer;
   [0556] (e) an enzymatically active RNA sequence;
   [0557] (f) a detectable label; and
   [0558] (g) an RNA sequence forming at least partially double-stranded RNA.
[0559] 157. The composition of any one of embodiments 146 to 156, wherein the Cas12a tracrRNA is provided as DNA encoding a first RNA molecule comprising the Cas12a tracrRNA and comprising a restriction endonuclease cleavage site that is suitable for insertion of a sequence coding for a functional RNA moiety, wherein the functional RNA moiety comprises RNA forming at least partially double-stranded RNA capable of silencing a gene.
[0560] 158. The composition of any one of embodiments 146 to 156, wherein the Cas12a tracrRNA is provided as DNA encoding a first RNA molecule comprising the Cas12a tracrRNA and comprising a restriction endonuclease cleavage site that is suitable for insertion of a sequence coding for a functional RNA moiety, wherein the functional RNA moiety comprises an RNA sequence for annealing to a donor polynucleotide, and wherein the composition further comprises the donor polynucleotide.
[0561] 159. The composition of any one of embodiments 146 to 156, wherein the Cas12a tracrRNA is provided as a functional RNA molecule comprising the Cas12a tracrRNA and a functional RNA moiety, or as a polynucleotide encoding the functional RNA molecule, and wherein the functional RNA moiety is at least one selected from the group consisting of:
   [0562] (a) a nucleotide sequence for annealing to a donor polynucleotide;
   [0563] (b) a nucleotide sequence for annealing to the crRNA 3′ extension;
   [0564] (c) a terminator sequence;
   [0565] (d) an RNA aptamer;
   [0566] (e) an enzymatically active RNA sequence;
   [0567] (f) a detectable label; and
   [0568] (g) an RNA sequence forming at least partially double-stranded RNA.
[0569] 160. The composition of any one of embodiments 146 to 156, wherein the Cas12a tracrRNA is provided as a functional RNA molecule comprising the Cas12a tracrRNA and a functional RNA moiety, or as a polynucleotide encoding the functional RNA molecule, and wherein the functional RNA moiety comprises RNA forming at least partially double-stranded RNA capable of silencing a gene.
[0570] 161. The composition of any one of embodiments 146 to 156, wherein the Cas12a tracrRNA is provided as a functional RNA molecule comprising the Cas12a tracrRNA and a functional RNA moiety, or as a polynucleotide encoding the functional RNA molecule, wherein the functional RNA moiety comprises an RNA sequence for annealing to a donor polynucleotide, and wherein the composition further comprises the donor polynucleotide.
[0571] 162. The method of any one of embodiments 102-122, wherein modification of the locus of interest occurs at a greater frequency compared to a control method, wherein a control engineered system identical to the engineered system except for the absence of the Cas12a tracrRNA is delivered to the locus of interest.
[0572] 163. A method of modifying a target sequence in a locus of interest of a eukaryotic cell comprising delivering the engineered system according to embodiment 92 or 93 to the locus of interest, wherein the spacer sequence hybridizes with the target sequence, whereby modification of the locus of interest occurs at a greater frequency compared to a control method, wherein a control engineered system identical to the engineered system except for the absence of the Cas12a tracrRNA is delivered to the locus of interest.
[0573] 164. A method of producing a eukaryotic cell comprising a modification of a genetic locus of interest comprising (i) delivering the composition of any one of embodiments 147 to 161 to the genetic locus of interest, wherein the spacer sequence hybridizes with a target sequence located in the genetic locus of interest of the eukaryotic cell and whereby the composition introduces the modification into the genetic locus of interest.
[0574] 165. The method of embodiment 164, further comprising isolating the eukaryotic cell comprising a modification of the genetic locus of interest.
[0575] 166. The method of embodiment 164 or 165, further comprising propagating the eukaryotic cell comprising the modification of the genetic locus of interest.
[0576] 167. The method of embodiment 164, 165, or 166, further comprising introducing the eukaryotic cell comprising the modification of the genetic locus of interest into a host organism.
[0577] 168. The method of embodiment 164, 165, or 166, further comprising regenerating the eukaryotic cell comprising the modification of the genetic locus of interest into an organism comprising the modification of the genetic locus of interest.
[0578] 169. The method of embodiment 168, wherein the organism is a plant, optionally wherein the plant is a maize, soybean, wheat, rice, cotton, or Brassica sp. plant, and optionally further comprising propagating the plant or harvesting seed therefrom.
[0579] 170. The method of any one of embodiments 164 to 169, wherein the modification in selected from the group consisting of an insertion of one or more nucleotides, a deletion of one or more nucleotides, or a substitution of one or more nucleotides
[0580] 171. The method of any one of embodiments 164 to 170, wherein the eukaryotic cell is a non-human mammalian cell, a plant cell, or a fungal cell.
[0581] 172. The method of any one of embodiments 164 to 170, wherein the eukaryotic cell is an isolated cell an in vitro axenic culture.
[0582] 173. The method of embodiment 172, wherein the isolated cell is a human cell.

[0583] All cited patents and patent publications referred to in this application are incorporated herein by reference in their entirety. All of the materials and methods disclosed and claimed herein can be made and used without undue experimentation as instructed by the above disclosure and illustrated by the examples. Although the materials and methods of this disclosure have been described in terms of embodiments and illustrative examples, it will be apparent to those of skill in the art that substitutions and variations can be applied to the materials and methods described herein without departing from the concept, spirit, and scope of the invention. For instance, while the particular examples provided illustrate the methods and embodiments described herein using a specific plant, the principles in these examples are applicable to any plant of interest. All such similar substitutes and modifications apparent to those skilled in the art are deemed to be within the spirit, scope, and concept of the invention as encompassed by the embodiments of the inventions recited herein and the specification and appended claims.

The application's sequence listing, which the Patent Office published only in electronic form, follows.

SEQUENCE LISTING (241 sequences)

SEQ ID NO: 1 - RNA, 84 nt, Lachnospiraceae bacterium ND2006
acuuauacuaaauuuuaacuguauacuuucccaaaauaccauaggcucucugaaucucuuaacccagauuccaagggcuuuuuu

SEQ ID NO: 2 - DNA, 84 bp, Lachnospiraceae bacterium ND2006
acttatactaaattttaactgtatactttcccaaaataccataggctctctgaatctcttaacccagattccaagggctttttt

SEQ ID NO: 3 - RNA, 65 nt, Lachnospiraceae bacterium ND2006
aauugcaaaucuuugaaauaaugcagacuuaaauuuauaaauucauggaauaaggugauuuuauu

SEQ ID NO: 4 - DNA, 65 bp, Lachnospiraceae bacterium ND2006
aattgcaaatctttgaaataatgcagacttaaatttataaattcatggaataaggtgattttatt

SEQ ID NO: 5 - DNA, 36 bp, Lachnospiraceae bacterium ND2006
atctacacttagtagaaattatttaatctttgaaac

SEQ ID NO: 6 - RNA, 72 nt, Acidaminococcus sp. BV3L6
cauugucuaaccugcaaaccuccaacuuacuauugcuaaggaguauauauuuuguauaaaaggucuuuuuuc

SEQ ID NO: 7 - DNA, 72 bp, Acidaminococcus sp. BV3L6
cattgtctaacctgcaaacctccaacttactattgctaaggagtatatattttgtataaaaggtcttttttc

SEQ ID NO: 8 - DNA, 35 bp, Acidaminococcus sp. BV3L6
atctacaagagtagaaattaaaaaggtcttttgac

SEQ ID NO: 9 - DNA, 128 bp, Lachnospiraceae bacterium ND2006
aattgcaaatctttgaaataatgcagacttaaatttataaattcatggaataaggtgattttattgtgaaaaaatactcgtattttgttggaaaaacatctttttgttgtataatatgatgatatacg

SEQ ID NO: 10 - DNA, 141 bp, Artificial sequence
  Synthetic construct
gttttagagctaggccaacatgaggatcacccatgtctgcagggcctagcaagttaaaataaggctagtccgttatcaacttggccaacatgaggatcacccatgtctgcagggccaagtggcaccgagtcggtgcttttt

SEQ ID NO: 11 - protein, 1246 aa, Artificial sequence
  Synthetic construct
MLKNVGIDRLDVEKGRKNMSKLEKFTNCYSLSKTLRFKAIPVGKTQENIDNKRLLVEDEKRAEDYKGVKKLLDRYYLSFINDVLHSIKLKNLNNYISLFRKKTRTEKENKELENLEINLRKEIAKAFKGNEGYKSLFKKDIIETILPEFLDDKDEIALVNSFNGFTTAFTGFFDNRENMFSEEAKSTSIAFRCINENLTRYISNMDIFEKVDAIFDKHEVQEIKEKILNSDYDVEDFFEGEFFNFVLTQEGIDVYNAIIGGFVTESGEKIKGLNEYINLYNQKTKQKLPKFKPLYKQVLSDRESLSFYGEGYTSDEEVLEVFRNTLNKNSEIFSSIKKLEKLFKNFDEYSSAGIFVKNGPAISTISKDIFGEWNVIRDKWNAEYDDIHLKKKAVVTEKYEDDRRKSFKKIGSFSLEQLQEYADADLSVVEKLKEIIIQKVDEIYKVYGSSEKLFDADFVLEKSLKKNDAVVAIMKDLLDSVKSFENYIKAFFGEGKETNRDESFYGDFVLAYDILLKVDHIYDAIRNYVTQKPYSKDKFKLYFQNPQFMGGWDKDKETDYRATILRYGSKYYLAIMDKKYAKCLQKIDKDDVNGNYEKINYKLLPGPNKMLPKVFFSKKWMAYYNPSEDIQKIYKNGTFKKGDMFNLNDCHKLIDFFKDSISRYPKWSNAYDFNFSETEKYKDIAGFYREVEEQGYKVSFESASKKEVDKLVEEGKLYMFQIYNKDFSDKSHGTPNLHTMYFKLLFDENNHGQIRLSGGAELFMRRASLKKEELVVHPANSPIANKNPDNPKKTTTLSYDVYKDKRFSEDQYELHIPIAINKCPKNIFKINTEVRVLLKHDDNPYVIGIARGERNLLYIVVVDGKGNIVEQYSLNEIINNFNGIRIKTDYHSLLDKKEKERFEARQNWTSIENIKELKAGYISQVVHKICELVEKYDAVIALEDLNSGFKNSRVKVEKQVYQKFEKMLIDKLNYMVDKKSNPCATGGALKGYQITNKFESFKSMSTQNGFIFYIPAWLTSKIDPSTGFVNLLKTKYTSIADSKKFISSFDRIMYVPEEDLFEFALDYKNFSRTDADYIKKWKLYSYGNRIRIFRNPKKNNVFDWEEVCLTSAYKELFNKYGINYQQGDIRALLCEQSDKAFYSSFMALMSLMLQMRNSITGRTDVDFLISPVKNSDGIFYDSRNYEAQENAILPKNADANGAYNIARKVLWAIGQFKKAEDEKLDKVKIAISNKEWLEYAQTSVKH

SEQ ID NO: 12 - DNA, 72 bp, Artificial sequence
  Synthetic construct
gtttcaaagattaaataatttctactaagtgtagattggacagagctccaagtgaccaaaaccgtatatcat

SEQ ID NO: 13 - DNA, 678 bp, Zea mays
atagagagagaagaggggtcgtgtagtagtgcttaaactgtacatgaacagcagtagtgttacagaagctaaactcaaccagagctccaccaaagacaaagagggtctacttccatcaccgtcttgctcggtcacttggagctctgtccataaattaaacccatcgtggcatatctgtaggcatctaccccgtcttcgtcgtccgttcctcactagctaccaagaggtcgccattattgccaacatagagtgtacgtggatgtctatatatatgcctacttgcacccatatggcataggcgttcgatccccttagcgcggaggagagctcctccggttcttctctacccttcgcatggaagttcttgcattgcttcgttgcttctctagtttcttccttctacgtctttccagcatacgcatgcccctcgtccgccggttcacgaggcatcgtctgatgatcagtagataataagcaatataatactgatctagaatcgagttgttgtactcttcgcagataggttcgttccttcacatagaagcgagtacagactacagaccacacagtatcagctggcacgaaacgaaaatggttacttgcaaattgcatgcacgagctagaattatattcttctaatcttcttcgttgactttctggcttcagcaggcgcgtgat

SEQ ID NO: 14 - DNA, 1422 bp, Artificial sequence
  Synthetic construct
atggcttcaaactttactcagttcgtgctcgtggacaatggtgggacaggggatgtgacagtggctccttctaatttcgctaatggggtggcagagtggatcagctccaactcacggagccaggcctacaaggtgacatgcagcgtcaggcagtctagtgcccagaagagaaagtataccatcaaggtggaggtccccaaagtggctacccagacagtgggcggagtcgaactgcctgtcgccgcttggaggtcctacctgaacatggagctcactatcccaattttcgctaccaattctgactgtgaactcatcgtgaaggcaatgcaggggctcctcaaagacggtaatcctatcccttccgccatcgccgctaactcaggtatctacagcgctggaggaggtggaagcggaggaggaggaagcggaggaggaggtagcggacctaagaaaaagaggaaggtggcggccgctggatccccttcagggcagatcagcaaccaggccctggctctggcccctagctccgctccagtgctggcccagactatggtgccctctagtgctatggtgcctctggcccagccacctgctccagcccctgtgctgaccccaggaccaccccagtcactgagcgctccagtgcccaagtctacacaggccggcgaggggactctgagtgaagctctgctgcacctgcagttcgacgctgatgaggacctgggagctctgctggggaacagcaccgatcccggagtgttcacagatctggcctccgtggacaactctgagtttcagcagctgctgaatcagggcgtgtccatgtctcatagtacagccgaaccaatgctgatggagtaccccgaagccattacccggctggtgaccggcagccagcggccccccgaccccgctccaactcccctgggaaccagcggcctgcctaatgggctgtccggagatgaagacttctcaagcatcgctgatatggactttagtgccctgctgtcacagatttcctctagtgggcagggaggaggtggaagcggcttcagcgtggacaccagtgccctgctggacctgttcagcccctcggtgaccgtgcccgacatgagcctgcctgaccttgacagcagcctggccagtatccaagagctcctgtctccccaggagccccccaggcctcccgaggcagagaacagcagcccggattcagggaagcagctggtgcactacacagcgcagccgctgttcctgctggaccccggctccgtggacaccgggagcaacgacctgccggtgctgtttgagctgggagagggctcctacttctccgaaggggacggcttcgccgaggaccccaccatctccctgctgacaggctcggagcctcccaaagccaaggaccccactgtctcctga

SEQ ID NO: 15 - DNA, 138 bp, Artificial sequence
  Synthetic construct
atggatgctcttgacgattttgacctcgatatgctcgacgctcttgatgattttgatctcgacatgctcgatgcacttgatgactttgaccttgacatgctcgacgcactcgatgacttcgacctcgacatgctttag

SEQ ID NO: 16 - DNA, 400 bp, Triticum aestivum
ggcggcagggagagttttaacattgactagcgtgctgataatttgtgagaaataataattgacaagtagatactgacatttgagaagagcttctgaactgttattagtaacaaaaatggaaagctgatgcacggaaaaaggaaagaaaaagccatacttttttttaggtaggaaaagaaaaagccatacgagactgatgtctctcagatgggccgggatctgtctatctagcaggcagcagccctaccaacctcacgggccagcaattacgagtccttctaaaacgtcccgccgagggcgcgtggccgtgctgtgcagcagcacgtctaacattagtcccacctcgccagtttacagggagcagaaccagcttataagcggaggcgcggcaccaagaagc

SEQ ID NO: 17 - DNA, 299 bp, Agrobacterium tumefaciens
gatcatgagcggagaattaagggagtcacgttatgacccccgccgatgacgcgggacaagccgttttacgtttggaactgacagaaccgcaacgttgaaggagccactcagccgcgggtttctggagtttaatgagctaagcacatacgtcagaaaccattattgcgcgttcaaaagtcgcctaaggtcactatcagctagcaaatatttcttgtcaaaaatgctccactgacgttccataaattcccctcggtatccaattagagtctcatattcactctcaatccaaataatctgca

SEQ ID NO: 18 - DNA, 899 bp, Zea mays
tgcagtgcagcgtgacccggtcgtgcccctctctagagataatgagcattgcatgtctaagttataaaaaattaccacatattttttttgtcacacttgtttgaagtgcagtttatctatctttatacatatatttaaactttactctacgaataatataatctatagtactacaataatatcagtgttttagagaatcatataaatgaacagttagacatggtctaaaggacaattgagtattttgacaacaggactctacagttttatctttttagtgtgcatgtgttctcctttttttttgcaaatagcttcacctatataatacttcatccattttattagtacatccatttagggtttagggttaatggtttttatagactaatttttttagtacatctattttattctattttagcctctaaattaagaaaactaaaactctattttagtttttttatttaataatttagatataaaatagaataaaataaagtgactaaaaattaaacaaataccctttaagaaattaaaaaaactaaggaaacatttttcttgtttcgagtagataatgccagcctgttaaacgccgtcgacgagtctaacggacaccaaccagcgaaccagcagcgtcgcgtcgggccaagcgaagcagacggcacggcatctctgtcgctgcctctggacccctctcgagagttccgctccaccgttggacttgctccgctgtcggcatccagaaattgcgtggcggagcggcagacgtgagccggcacggcaggcggcctcctcctcctctcacggcaccggcagctacgggggattcctttcccaccgctccttcgctttcccttcctcgcccgccgtaataaatagacaccccctccacaccctct

SEQ ID NO: 19 - DNA, 2243 bp, Solanum lycopersicum
atcgtatccagtgcaccatattttttggcgattaccactcatattattgtgtttagtagatattttaggtgcataattgatctcttctttaaaactaggggcacttattattatacatccacttgacacttgctttagttggctattttttttattttttattttttgtcaactaccccaatttaaattttatttgattaagatatttttatggacctactttataattaaaaatattttctatttgaaaaggaaggacaaaaatcatacaattttggtccaactactcctctctttttttttttggctttataaaaaaggaaagtgattagtaataaataattaaataatgaaaaaaggaggaaataaaattttcgaattaaaatgtaaaagagaaaaaggagagggagtaatcattgtttaactttatctaaagtaccccaattcgattttacatgtatatcaaattatacaaatattttattaaaatatagatattgaataattttattattcttgaacatgtaaataaaaattatctattatttcaatttttatataaactattatttgaaatctcaattatgattttttaatatcactttctatccatgataatttcagcttaaaaagttttgtcaataattacattaattttgttgatgaggatgacaagatttcggtcatcaattacatatacacaaattgaaatagtaagcaacttgattttttttctcataatgataatgacaaagacacgaaaagacaattcaatattcacattgatttatttttatatgataataattacaataataatattcttataaagaaagagatcaattttgactgatccaaaaatttatttatttttactataccaacgtcactaattatatctaataatgtaaaacaattcaatcttacttaaatattaatttgaaataaactatttttataacgaaattactaaatttatccaataacaaaaaggtcttaagaagacataaattctttttttgtaatgctcaaataaatttgagtaaaaaagaatgaaattgagtgatttttttttaatcataagaaaataaataattaatttcaatataataaaacagtaatataatttcataaatggaattcaatacttacctcttagatataaaaaataaatataaaaataaagtgtttctaataaacccgcaatttaaataaaatatttaatattttcaatcaaatttaaataattatattaaaatatcgtagaaaaagagcaatatataatacaagaaagaagatttaagtacaattatcaactattattatactctaattttgttatatttaatttcttacggttaaggtcatgttcacgataaactcaaaatacgctgtatgaggacatattttaaattttaaccaataataaaactaagttatttttagtatatttttttgtttaacgtgacttaatttttcttttctagaggagcgtgtaagtgtcaacctcattctcctaattttcccaaccacataaaaaaaaaataaaggtagcttttgcgtgttgatttggtacactacacgtcattattacacgtgttttcgtatgattggttaatccatgaggcggtttcctctagagtcggccataccatctataaaataaagctttctgcagctcattttttcatcttctatctgatttctattataatttctctgaattgccttcaaatttctctttcaaggttagaatttttctctattttttggtttttgtttgtttagattctgagtttagttaatcaggtgctgttaaagccctaaattttgagtttttttcggttgttttgatggaaaatacctaacaattgagttttttcatgttgttttgtcggagaatgcctacaattggagttcctttcgttgttttgatgagaaagcccctaatttgagtgtttttccgtcgatttgattttaaaggtttatattcgagtttttttcgtcggtttaatgagaaggcctaaaataggagtttttctggttgatttgactaaaaaagccatggaattttgtgtttttgatgtcgctttggttctcaaggcctaagatctgagtttctccggttgttttgatgaaaaagccctaaaattggagtttttatcttgtgttttaggttgttttaatccttataatttgagttttttcgttgttctgattgttgtttttatgaatttcctgca

SEQ ID NO: 20 - DNA, 1327 bp, Arabidopsis thaliana
gtcgagctgcaggtcaacggatcaggatattcttgtttaagatgttgaactctatggaggtttgtatgaactgatgatctaggaccggataagttcccttcttcatagcgaacttattcaaagaatgttttgtgtatcattcttgttacattgttattaatgaaaaaatattattggtcattggactgaacacgagtgttaaatatggaccaggccccaaataagatccattgatatatgaattaaataacaagaataaatcgagtcaccaaaccacttgccttttttaacgagacttgttcaccaacttgatacaaaagtcattatcctatgcaaatcaataatcatacaaaaatatccaataacactaaaaaattaaaagaaatggataatttcacaatatgttatacgataaagaagttacttttccaagaaattcactgattttataagcccacttgcattagataaatggcaaaaaaaaacaaaaaggaaaagaaataaagcacgaagaattctagaaaatacgaaatacgcttcaatgcagtgggacccacggttcaattattgccaattttcagctccaccgtatatttaaaaaataaaacgataatgctaaaaaaatataaatcgtaacgatcgttaaatctcaacggctggatcttatgacgaccgttagaaattgtggttgtcgacgagtcagtaataaacggcgtcaaagtggttgcagccggcacacacgagtcgtgtttatcaactcaaagcacaaatacttttcctcaacctaaaaataaggcaattagccaaaaacaactttgcgtgtaaacaacgctcaatacacgtgtcattttattattagctattgcttcaccgccttagctttctcgtgacctagtcgtcctcgtcttttcttcttcttcttctataaaacaatacccaaagagctcttcttcttcacaattcagatttcaatttctcaaaatcttaaaaactttctctcaattctctctaccgtgatcaaggtaaatttctgtgttccttattctctcaaaatcttcgattttgttttcgttcgatcccaatttcgtatatgttctttggtttagattctgttaatcttagatcgaacacgattttctgggtttgatcgttagatatcatcttaattctcgattagggtttcatagatatcatccgatttgttcaaataatttgagttttgtcgaataattactcttcgatttgtgatttctatctagatctggtgttagtttctagtttgtgcgatcgaatttgtcgattaatctgagtttttctgattaacagg

SEQ ID NO: 21 - DNA, 872 bp, Glycine max
tccctaattaatgtgatattgggaaagatacgtatgcaaagagaatggtaattaatgtgagatgaaactgaaaaatgacaaatgagaaatattggaaaaatcacacgttgaatgaacgtgagtatatgcatgtagaattagcaggataatgtaattcaaaatggacgaaaaatgtagaatggagaacttattcgctttattaataaaacaaaattaatttacgcatgcattgaggaagacaaaagttaaccgaatccaccctaattaatgtgatattgagaaagatttttgttttttggttaatatgatattggaaaagatacgttgaaaatataatggtaattaatgtgagaagagactaaaagatgacaaatgagaaatattggaaaagtcacgcgttgaatgaacgggaatataatgcaaaatagacgaaagatgtagaatagagaacttatttgctttattaataaaatatgaatttagttaaatttgacctaaattgggccatgtacaaattgtacacaaatatacactaagcatagaaacgaaaatataatatattatttcggaattttgaacaatattttccaaattttcaataagcaataacattcaaccacgaattctatttgtttggtcatgacgtctttagaggccacgcatttgactcctagaatattctggacccaccgtaacaactatccgttacttttcttaatccctaatctttcaagagttctggattcttctattcgccctatataaacaacccccttttcttcgtgcttcattcatctcaatcgcaatctctcaatcgttttctacataatacaaacctctctaatttttgaagctaattatacccaatctcg

SEQ ID NO: 22 - DNA, 1427 bp, Glycine max
aacaattagatgatacccattgcccttacgttttctttaacatcaattattgtttttgtcaacaagctatcttttagttttattttattggtaaaaaatatgtcgccttcaagttgcatcatttaacacatctcgtcattagaaaaataaaactcttccctaaacgattagtagaaaaaatcattcgataataaataagaaagaaaaattagaaaaaaataacttcattttaaaaaaatcattaaggctatattttttaaatgactaattttatatagactgtaactaaaagtatacaatttattatgctatgtatcttaaagaattacttataaaaatctacggaagaatatcttacaaagtgaaaaacaaatgagaaagaatttagtgggatgattatgattttatttgaaaattgaaaaaataattattaaagactttagtggagtaagaaagctttcctattagtcttttcttatccataaaaaaaaaaaaaaaaatctagcgtgacagcttttccatagattttaataatgtaaaatactggtagcagccgaccgttcaggtaatggacactgtggtcctaacttgcaacgggtgcgggcccaatttaataacgccgtggtaacggataaagccaagcgtgaagcggtgaaggtacatctctgactccgtcaagattacgaaaccgtcaactacgaaggactccccgaaatatcatctgtgtcataaacaccaagtcacaccatacatgggcacgcgtcacaatatgattggagaacggttccaccgcatatgctataaaatgcccccacacccctcgaccctaatcgcacttcaattgcaatcaaattagttcattctctttgcgcagttccctacctctcctttcaaggttcgtagatttcttctgtttttttttcttcttctttattgtttgttctacatcagcatgatgttgatttgattgtgttttctatcgtttcatcgattataaattttcataatcagaagattcagcttttattaatgcaagaacgtccttaattgatgattttataaccgtaaattaggtctaattagagtttttttcataaagattttcagatccgtttacaacaagccttaattgttgattctgtagtcgtagattaaggtttttttcatgaactacttcagatccgttaaacaacagccttatttgttgatacttcactcgtttttcaagaaattgttcagatccgttgataaaagccttattcgttgattctgtatggtatttcaagagatattgctcaggtcctttagcaactaccttatttgttgattctgtggccatagattaggattttttttcacgaaattgcttcttgaaattacgtgatggattttgattctgatttatcttgtgattgttgactctacag

SEQ ID NO: 23 - DNA, 1294 bp, Glycine max
tccattattcgggatttagcaaattgtttgtttcttcaatatttgattgaatactaatttaaaactaaaataagagagcgtgacaaatcaaaaatatagtgtgttatataatgtttccgtgcaggagatcatataggaccactagttgttaatcttagtcacaaaacaatacatgtcttgcaaagaaaaaatcgtagacataatctgttacatttttgttagaaaagttttgttcagcaaaatgttttcatttaactcgatttgatatgctgtggttttggtatttttacacacagtagttttttttttaattattgttaagcgaatttaaaatagttattattattattaagaggcttttaaatactgaaggtgtaaaaaaaatgcttcaattactttaaaactttagacatcttaattttaaccaaaatatggagctaaaaatgaatcacgaagaaagtatgaaagaattcctccatttttttagcattttattttgtctttaaaaataagaaataaagtaatattttaaaaattattagccagagtaaaaaaaatttattaaggctctttatatttacatttttttaaatcattaataatattcctaaagtctcttatctatgcaagatttagagtgtaatattttttaatttatgtgattaaacaagtgaagttaatgaattattgaactcttaaatactcctaatttataggtattgagtgttcaaggtgttgaataatccattaatttcaaccaaccaaaatattttgatctaaattttattattatttgagtagaattcaaccacattcaaagttgttttcttatgttagagtaacaactttttttttttttttctaaatactcataaatctaatgactcaattcattcacatgacactttattttaattatgatgttcaatttcttagaaaattcgaagtttaactttttggagaccaaatttaaatcaacatgttattaattgtatttgacagaaaaaagcttaaaccaaacccattccaaactaaaacattttaattggttttggtaatgaatgagtttagttaaagtcaacctaaatttgcaatgtacgcgtttgcgtcgccgtcattagaggccagaattgactcctagaatattctagacctaccctaacaactatccgttacttttcttaatccctaatatttcaagagttctagattcttctattcgccctatataaacaacctcattctcgattgcttcctacaccactaaaatatctctctattattctcgttttca

SEQ ID NO: 24 - DNA, 1176 bp, Glycine max
caagcagaacactgagacatagaggaggattgaagtgcagaaaatatatattacctctattctaaaataagtgtcacattttgataaaataaatcgttttttattaaatacactccaattcttggatttcttggaattctccaaaaaaaaaaagagattgtgagatatattaaaaaggtcaataaatcttaaaaaatatttagttttaaaataaatttaaaataaatttaaaatattgttagaatgtttatcatcttattagttggcgacggataaaaaaatgctattagttgccgaaaaggactcataagccagttgccctgtcaacgtgggctcgtggttccaattcgtccacgtgtcacaacgtgattgaaagaggtgcctttgcgttgctataaaagcgaagcccacaccaaaatcatcatcaatccaaatatttaatcctatcctatcgtagcaaagaaagaaagaaagaaaaccctagcttaccttttcaactttcaaggtaccttctgctcctcttctgttttcgattaagatttcggttgttagggttttatgctttttttttttatcgatcatcggacctgtcgagctatttgaattttgatctggattttttttcgtgtctttgattttaccgtctatataattacgcaacctggtatccgttttgaaacttttgttgattatttggctttgtttcaaattatttgttgattgaaagtgatcctgatgttatgaggttatatatttaatttgtcagaacttggggcatgtattgtgtattgtatacaggtaaaatctctattgtttagatttgttaaaggtattttcctcgtctattttggatatcaatctgattgatttatttattggaatcgagttatcaaaagcgttgttgtatttttgttttgtcctggctttaattctgtctatgttgtatatcactgcacatgtagttttgtaacttggttttccttgttatattgtttgggagggtttgatggactaatttttcaatttttttaagctgtaaatataatgttggataattttgctttcagttctctgatttgtattgtctttccattctctgttcatgaacattttaatggttatgataaagagttggtgactgattcatttattttgttgactgtattgtatatgtag

SEQ ID NO: 25 - DNA, 1427 bp, Glycine max
cataccattgagatccttgttgagtgtttgagtcctcaatcctcagcaaccaatctcaacaaatccacatggcttacgattggttccttgcccttgcctttctccatggagagaaaaacgtttccatctcgataaaaaagatagaggtaatacgagagaaggttaatacgagagacagaaaatgaaatatttgaagagatactcatttttattaattgcatggaatgagaagagtggatggacgatgtatggaaaataggtttttctactaatgaagttgacaatatataaatgacagaattaaaaaatatattattaatagattagttggtgacttataaataagatcaaatatttcttatagaaggtgatcaatatataagatcggacggaatacactttaaaaaaagattaaaaaaatattttgtgaattcaaaagaattaaaagacaaatttaaatttaaagtattaaaaaattattcataattaatggattaaaaacatatttaagaaaaaataaaaattataacaaagagataaatttaggttttaggtggcagaaaagcattttgtcatcgacgacgttagaagcaaaatgtagaatcttccggaccattgtagaaacgtaatccttatcttgccgtgcgtgtcaatgaccaccaccgtacacgtggcaaatcttaattcgttcagtttcggatattttcgtcattgagacatcgcaccaagctataagtacgaccccttctacctctaattcatgcatagcaattcccaattcctaattgtttaaacctaattctcatttcttcatcgttcgattcttctcctcctaaaggtacggctctggtttcctctctctcttgttcattcttttcgtaatagcaaccttattagccttcgtttattgatttttctcctaattacacttcaattttttcgatttgtgtttgttacgtcaatctgtatatcttttttgttgtcgtcgaatccgaaacttttcattcgcctttctgattccgtaaatcgtttgttaagtgcaacatctttccctgttcttaggtatctgattgatttctctctttctttttttttttatcagttttgaggaattagggttcgtgatctgatttgtttctttaaaatttccccggttcttaattaggctctgcgatttaatttcttttatcatatttgaagaatcatggttctttcttggtttgatttattgtgcactcagtttctgatatgcaaaatctttccctgttttaattaaggtttagggtttgcgagttgtcattttggaaaatagggtttgtggtttattgattgtgtaatccgtttggttgtaagcagaaacttctctgttttaaatcattgtttgtgatttagctctattttttatggttctgtttgtgattgaacag

SEQ ID NO: 26 - DNA, 502 bp, Nicotiana tabacum
gggatcttctgcaagcatctctatttcctgaaggtctaacctcgaagatttaagatttaattacgtttataattacaaaattgattctagtatctttaatttaatgcttatacattattaattaatttagtactttcaatttgttttcagaaattattttactattttttataaaataaaagggagaaaatggctatttaaatactagcctattttatttcaattttagcttaaaatcagccccaattagccccaatttcaaattcaaatggtccagcccaattcctaaataacccacccctaacccgcccggtttccccttttgatccatgcagtcaacgcccagaatttccctatataattttttaattcccaaacacccctaactctatcccatttctcaccaaccgccacatagatctatcctcttatctctcaaactctctcgaaccttcccctaaccctagcagcctctcatcatcctcacctcaaaacccaccgg

SEQ ID NO: 27 - DNA, 2243 bp, Solanum lycopersicum; identical to SEQ ID NO: 19

SEQ ID NO: 28 - DNA, 1833 bp, Pyrus communis
ttataataactttaaccgtttgattaaatttcaatggtctggatctccagatttgatagactggaaggaatggatccagagatgatccctttccttcttttggcaccacctcaatggctaatcttgtttaatacctaatactaaattttgctctgattaatcgaaggtccttgcaatacacgcatacatcatattcaattgctataaaaaataaaatacaaatttgtttatcttaaattcttaatcatgatagtatttatattagaaatacaatgcaaatgaagtttcaacacttataaacaacatgaaatggtgcacaaccttttaaactaatataaatgaaagttgtaactggcgcgaaagaagtcgaggagtcaggattttcaaataattgagtcatgttttcgataaaaaaattttattagatatttcgtcgagcacttgttctacatgtcgattttttacaacatttcttaaaggcttatgccaatatatgtcaataactactattatatgtagagtcaaatatggctatatagaatttacagtaatattaagaatggtagaacttgtcatcggagcatttcgtcaagtatttagtgcgcacaataggttagatggcctaatacgaattattggtgattagtgatcgtaataattcgaagggcaagtggacagaaaagtataaatactcaaggaaattgttattggcactccaaaaatctcattttactctacttataaatgtataataagatttttgaagtactacttctcatactcaatctcgaagataacgccgtaagggccccgtgaaggaggaagtcatttgagatcacggactttgatattatcaaagaaggggactagataccaggctttgccgtttaacccgcgccatcggcacgtcattccatccacgtgtcgctaaataagtggacctcctcgtcacgccaactacaattccgtgacgaagtcgccttctctaacgctataaatccaggcatcagcctctccccttcctcacaattgcgattgttttgcttctcaacaatctgaaaaatcctcctctaaatctctctcgaagctccctcagcctttcaaggtgtgttctttttttcttgtttcttgttaatttcttgtttggttgctaggaaagtgtaggaaaattggagattctgtatttgatttggttgatgtttgagatttatgattaatcggttggatctgttaaatttagcattgttttggcttttgatgttagggtttttttatttattggatgcgaaattagtaacttggaaagaaaatttgcgtcgaatcttgtgttcaattttcacgaattaggggttttgtgtattttatctaaatgatcagcatgtcttttcgaattgaaagtaaatttctttgtatcaattttgacaagtaggttttattctgtatccgatatcgaaattgagatttgttaatggtcaatttaattttgctatttatttttattccaaaattgagtaattttagactaaaattgtgtctttgatctgtgatttaaagctaaagcagggtttttttttcctttacctgatttgctgaaattcaatttgcaatcttgatcttgaattgatttattgtatataaatggctgttaatattttgtttatataaaaattgggattttcttgaatttctttgatttctgatgcattagtttccaaattaggggtttttttttttttttttttttaatctgattttcttatctgtaattcttaattttaatctaaagggatttgtttttttatgcttaatcttatggtattttggtttctgtag

SEQ ID NO: 29 - DNA, 1631 bp, Beta vulgaris
atatgtagccctaagggctatgtatatcattttcctagatttattatttggttgtgcaatttggtctatttagataaaattgagtctatgagacacgggttaagaaatacttgacatacatttatttagtttacatatatatacaccaattacacgcttggtaactagtcagacaacccatttactccctggcccctgcggtctgtacccgtttcttttgcacaaagtttcaggagaaataatgttgtgggacataaaaagatagagaaactattattttatattaaagtatgtgattacattccaaaactagaataaaaagaaatgaataaactaattaaaaacatctcaaaaaagaatacggataaactaataaagaccgaaactagtactccctccgtcccaaaatatagttcccattacccattttttacggtaatttatgcaagtagaatctaagagggataacaaagattttttgtttatttaaataaatgttgtatggaaaaagatgattttaggagagagaatggagaatgattggtgggagagcattaattgtaacattttggttgaataaacaaaggaaaaaacaaaattcaagaagcaaataaatgatgggacacgatttttctaggtaaattacggaaaaatgtgaaactaaatatgaaaatgagaactatatttttggacacttaaaatggaaataggaactatattttgggacggagggagtaataaataacgacttggtcgtctaccgttccagaccgtcagattaaaccctcaccataaatcttgtaggtagcacgtactatataatttcacaagttcgagaagtcgtgagaatctccgtctctagttgaaccgcctcaaaagcaaagaaaagtagctttacccgtgagggctaggtcaagacacgtcatacatcacacgtgtcaaacgatgattggtaaactagagataattgtcttaattaagtcggtcaaacaagtctttaaatacagcctattcccttcattggtttctcatccttcatttgaacgtaaacgatcattcatttttctctctcctctctttcaaggtaaattcctaatttccttttctctcttctcagttttcttcgtaaattttcatctcatttctgtgtaagataacaagatccaatttagttagtgtaagattgatttatctaagaaattcatttggaattttgttctttttgattttcaatttctcaggattttgtcgacaaaaaattaatcaaattttgtgtttttcagtttcatatagatctttcttgtgttgttgaaatacagatctgatcattgttacaatttctaaaatttaggtttgaaaattcgccataatttctcgtacttctgcaatcgattgatttttaattcggaaaaattagtgttaaagatatcgccataatttatcacaattctgcaatcgattaaattttcgatctggaaaaatctagggttaaaatctcgccagaatttatcgcaattctccaatcgtttaatttctgatttagtgtattctagggttaaagatctcgtcataaatttttcaaaatttcgtaaattgatgtgatttctgatccttttctttcgattttgtag

SEQ ID NO: 30 - DNA, 1441 bp, Raphanus raphanistrum
taaaagtacaacaactttttttttaggaaacaacaacttagctaacatatgtaacaaaattgcaaactgagctatctatctaatctgaaactgctgcacttcttgccactaaactatctcaggaaacccaacttagtctgtaagaagaaccatcaacgaacaaaactattcgaagaggctttcattgactgaataaacccgatatcttagaaatgggccaagcccaaaaaagtccgtttgatgtgtgataccgaatccattgccttcagcccatttgccaacttgataccaaaatcatgcaaatatccaaaaccactaaaaaaagaaaaaaacattatgttatttttcaggaaatttcctctattaattgtttgaagaaaaaaaaacaatttgccaacttgataccacaatcatgcaatatccaaaacgactaaaaataaaaaacattatgttattttcaggaagattccttttttatttttaaaattcaaaattaaaaaccccacctgcatagaaaaagggaaaattaaagaaaagaaaagataagagcatcgacatagggggaccatgggctcaattattggcatttttttagctccaccgttgattaaaaaaaaaaagaaagataataataacaccgatcgtaacgatccgttaaatcacaacgtcggcttctgttacggcccgttagaaactgtggttgtcgtggagttagtaaagaaacggcgttaaaatagaatgcagccaacacacgacgggtcgtgggggttatcaactcaaagcacaaaatatatacttttcctttatacctaaaaaaatcaaaggcgaaggaaagattatcttttccattaaaaggttgcgtgtaaccaacgctgaatacacgtcatttaacatacgtgtcgaaatcctattcgctattgcttcaccgccataggtttctcgtgaccgagtcctcctcatcctcttgtataaatcaaaccctaaacacctcttctccttcacaaatcgaaaaccaattcttctcaattctcaattctcaattctcaattctcaattctctctctctcgcgaattacgatcaaggttagattcgtgtttcttcttctctcgattagctgtttcgttcgatcgtaattgattaagccccgatagatctcgtcgtgattttgattattagggttcaattgttacgattaaggtttgattctggtttcttcttcatcgattagttgtttcattcaatcgtatatgtattttcgaatttgaatcggtttgttgagattaaacgatagaactcgtcgtgatttttgatttttccagatttgtgttggctacttgatcatatatgatccgtgtttgtatattgtagcgatctctttgtattgatttcgcaattgatccgagtcaaaagagtattgatcttggcttttgtgaattacag

SEQ ID NO: 31 - DNA, 1394 bp, Ipomoea nil
attagggaaaatagcactttttccccctaagttatatacttatagcattttttccccctcaattatttatgtaagtacattagccccctcaattattttaaaagtggtggtttttccccctgatatattaaattgacatttctacccttaaagtaaacattttatttttttacttctccaacaaattattgtgtatatgtagcaatgaccacggttcggttcgaactaaaccgcacactatagcaatcgaattaaaacttttcggttataattcagatctagaatccaatatttgaatttcaatttattaaatttatgaaccaaaaaaactggatcatgaaccgtgaaccggcgattatagatccggttcgcaattttgaaccgtctttattttaaaattttattttattttttattttaaaatagtctaaattcaacaataaatgtaatttattttttcagttcggaacatgaactggccattccggtttgcgattttaataaactctaaatatcgcattttgattctaaattgtaattggaatattttggtttggttggtatagtatctgtttggtttgaaccaaattatagtaataatttgttggagaagaaaaataaatgaaatatttattttaagagtaaatatgtccatttaatattttagggggaaaagaaccacttaaataattcaaggagaaaaagtgctataagtatataactcagggagaaaaagtgtcattttcccttattatatatatatatatatatatatataaataaaaaaatgaatagtataaaacaaatttataaattttgccggatcggataattatgaagcgcgtaggttttgaagtcaaaatcggctacttgccaaattgcaatttccgaacctaataatctccaccacgcaaagaaaatccgacaaataatgcaagccgttgcgtgtggtattgatcaatacacgtaatatccaacacgtgtccctccttcataggtcaacaagataagcactttcttcgcaaggcggtcgagacacgcctttataatcttctcctccctcgccctttctcatccatcatacgatttctctattctatccaaatttcttcctcctcaaaaccttctctcaaggtaaccacagttttctcaatcttccttcctttttgtttattgttattattgttaatgttaattgttaattttctgtgttattcttattcgtgattcgtgaattggggatctgggggttgtgttctttgatcttcataaattgcaattggttttagggttttttttttttttttttttttttggattgaattggtgttaattgaggatgttttatgtttgtatttgatggttaatttgattttgtatttggatatatacag

SEQ ID NO: 32 - DNA, 1438 bp, Cucurbita sp.
cttatgtgcaacgttacatttcggttatcatcttagttcccaacaacataactcatgcatcaggatgccattccatgtcttaggacaagtcaaccatcttgacttgcttgaacatgtctatcaagatcaatctatgtgtcactcatctcattgtgacatcctaaacatccattcatcatgtcattcatacctatcagggtcatccaacactatttttgatagacccatttcaaagaaagttgtccgagacactcgtccacaccgcgacacacatatgtgccacaagatagcccgcttaggctacatggcccaggaggagaagagagctaacaccatgcctctcctataatacattttgagccatttctaatctttctggagtagacgttattttgacaagtagtcatattgtagcattgagcgttgtcggatatccaattgacacaaattttggtgagtttcatcttttatataaatgaacttaactctagagccgtatcccgaaaactcatatagaaattctgacttctaaggttatgacccagggatctactcgaccctcttcgagattgtcttcgacgctcgtggttctctccaaccttcctaatttttcaatttgactttaatgtatacccttggtatattagatgatgcatcgtcctcttttcgtatcataacgcgtattggcccgggaaacataatttaaaagtctccccaagcctatctttgagtgtggggtcacagcccatctagagaaagaagaatagtagattcaactcaaagacgcgcaaaacgtctagaattttcttgagaaccactagaacctaactccgttataacgacgttagttgttgttttgcgtgctattattgagtcggcttattgctttgaattttggtccacagattccatttctgccttcgcctgcaagtaacggcgattgacagataataaatgcttacgtggcggaaatgtgtggataattcatcgcctgccatgacctaattctccttacaatttcctataaattcaccccttccgccctgggtttctccgcaattgaatctctcttctttcatcgaccaatctacagcgaattcttccaaggtatttttctgctttcttttctttttcgctttgattctgttcatctgtttcgagagttctggatcggtgttgtttttttccccttttgttgtggaaatttttgaatcgtttattcttctcggagatctgatgctttgtggttggatccgcttggatcgtttgaagttttatgatatgtattcggattgtagtgtgttttgtgagagattggcttgaaacattgggattttactgattttatcgaagtgaaatttagaatttaggtttttgacttgttcgtgttatcgttttgatagaaattgtcctgatttttgtgtttccttctgtatag

SEQ ID NO: 33 - DNA, 2560 bp, Helianthus annus
tacacttaggctattacttaacgcgggtcgcgagaggcctgtttttcagatttttaaaatcttttgaaatgattacgaaatcctggtaattaataacgaaatctttcgtaatgatttacctgacctttcgagtttgaaggggtaactttgcggtttggccctcggttaattacaactaaggacctcgtgttatttacccgcgttgttaagtccccgattagtttattaattactcagaaagccttcactttcattattgacgcttttaacccttctcctacgaattcgatcgtaactttctcgtttcataacgaaacttcgcgaaatttatatattatattttagtgagtgtataataccgttacaaagccttgggaacgttaaagggtcactcagaggtataattaaacatgttgacacggttaacccctgtagcttgtaatctctcactttctttcgtgtttcgcttctgtacgatctatgatttatttgtttgaaggttcaagcattatttagggttagtatacagtatatttacccttgttgacatttataaccctcgaatttatatactttcaaggtttgtcaaaattagtcctttatttaatattaatgccacgtgtaaacaaatgacacgtgttaacacatcattggacgcaaaaattcgaggtgttacagtaacagatctgaacccttgcttgatgctaagttgttttcttgtaggttttattatttcaattatcgctttattgcttcgttctaaacctgatatgtaagctatgagattattcttgtttgtcatatacttacatccgtttgttattgtgatttattaactgcgtttaagatatgcgcataaaaagttcagtcaacaattaaaaccatactacagccgcctgcattattacttttaagatatgtgtgttattgcttttgcgaccgaaaattattatcctgttggtttaatcgggtcagagatagtcatatcggtcgggatcgataaacgggtcggcatcaacttgggtcgatcggatccgggtgtgcatgtttgtggttgtagatgttgcaggtggaaagagagagaagtgtgttgaggtggggtatggcaggattatttatatatttatgaaatgactaaaatgcccttgacagacttaacacatatggatgaagttaagtcagttggaccaaaatggcaacgatgaaatatttttagatccagatgttaaaaataaaacctttgaactaaactgttaaaatgacccaaaccatagggactaaaatgacatttaactcttaaaaaaaaattagaaacaagataagggtcacgcaatattttattccaaaataaaaagaagacgccaaacctaaaaatcagcgactccattaaaaatcaaaacccatcaacggctcttatcttaactttggtgtttggtcaccaatactttatacacgtggcacattctccaccgattgttatctaaccgcaccgtcacgttaacctttctttgcgtgcacccttagctttattgttctataaattcacccccaatttatccccttcattcatcaaccaattctcttatcttcttcaatttctcagatctcttcaatcccttcaaggtatgttcctttcgatttgtgtgttttgtttttgttaatagatctgctatgtattgtttgatctgttaagttttagatcgatttgtttagatttagatacgctatatcgtttgatcggttaggattttgatcgatttatttaggtctgttatatcgtgtgatctgtaagctttttgattgatttagacctaaaatttgatcgtaggtgacttttactatgtatatattacgtctgattgttaggttttcttttagatctgtgatattgtttgatctgtaagtttttagattgatctagattgaaatttttaacggtaggtggtttaatatgcacaatttaacgtctgattgctagattttcgttatagatctgttatattgtctgatctgttaggttttcgatcggtaggtggctaaatatgtttgtatctgattagatctgatgattagacaaaggatgatgtgttttgatcttgaattcctttcgatttcgcgttatttataggtttttgtttcagatcggtgatatatacagttttacgtctgatcattagtttattgttttggatctgttagtttattgatcgattaaaacctacagttgatagtaggtgtcttaatatgtttataattcttagtctgaaccgatttgataagtacacaacgattttgaacggttaatcgtctagttcttgcagttttgtggataatgattctgttttttgtatgatatttgatctgatgattacataacgttttgtggttttatattatgaatttttaacagagattcgttaagatttttcagtcctgtttgttatgattttgtttttggttgaaattctgttttattgaggcgtgtttacttgtatttaaaaagttattttggtattgttactgatcttctgttcttatgcttttcaacagtagcaaaacc

SEQ ID NO: 34 - DNA, 601 bp, Solanum lycopersicum
tcgacatactcgactcagaaggtattgaggaatgatcgattctgggtcatttgtgtggttaatcaccctccaaatcaactaagtcatcctgaaggacaatatcctattttttctctcgtaggtttatcatttaaattactatcgcgtgataattttgtaacgtagaaaaataataccattaatccaaacgttatattcattaaaataattatgatacatttaaaaatatttcgtgacctctcaattattgcaaattctaagccatcccaagttttgaggctaattttttttactatactatttttacaaccacaaaaacataaaaaataaaaaataaaaaaaataaaccgagtcaattgctacaatcacttcattattaattttaattaatattatgtggttatatatgaaactgttagagaaataatagctccaccatatttttttctcaatttattttcactataaaaaggctatttcattataatcaaaacaagacacacacaaagagaaggagcaataaaataaaagtaaacaacaatttgtgtgtttaaaaaaaaaaaaaaagtacacacaccaaaaaaaaaaattccaatttaaa

SEQ ID NO: 35 - DNA, 2054 bp, Helianthus annus
taatcaacatcccgctgcaacgcgcgggtaagcataaactcgttcctatacaaattacaattccaaatcattcgatgaatcaaatgccacctaagaagatattaatctcataatcaaattattataccaaatcattgatctgggctttgtattactcgaattaatgctgttatgtttttattaaacgtatgggcttgcttgaaccaggcttaaggcatgagtgtacttttttttaaacaactaacataatcaatttcaagcacttttgggacaccgactggattaaacgcagtactttgaaagtaacccaagtccacctactcgtagacacaacagtaaaattactggtaaaacctgttggtttccctgagttttctgtcattgtccactaatgcctcattcttcaccaaatagaagttgaacctgcataatacaataaggctatgggatatactttcacgccccttaactacacgtaggcatcacatcacgtacttgaccctctttcacttcacttcacaacaaggaaattgtttaacgcccattaacaccccttaaattaaataaaatacatatatatagcatgttgtgtgtgtgtaaattttgcgatgcttgattctctccctctctctcctaattaacttcttaacatataaagcttttaataactcttaacactcttcaggaacggtataataaatgttaacggataccaactaggattacgtgatacaagccttcctctctaaaacttaagaaagtcaccaaaaagaaagtcaaagacggcaacggcaacccagaagctacgttctctttctagattctatgccctacctaccgtgtggtgcacaacaacttgacccccatcattgactctccaccgtacacgtgtcacgataccatttgttggtctcctaccacttacgtaacattaatattccatccgtgaccgcctcttcttcatcatcctataaattcaccttcttatctcttccgctttcattcgttcatcatcatcacaattaacaacaatccaaagcaatcttctctcatattcttatctcttcctgtttcgcttcgtctctttcaaggtatctatcatccttttctctatatatctcttcttgattattatgtgttgtcagatgttagatctatttagatttggaattgtgtgattgattatatgatttagaattttagatgcatgattgatcttcgtaatcatatgagtaatcgttttcagcgagacggattgtagatctggacgattgtaggtttttacgagttgttattggatcgtttgatgattgttgttatttgttagtttgatctgtttagatgtaaaattgtgtgaacataataacggagagatgacttgttgataatcgttctcaacgagacagattcatgttttactctagatctggctaatgtgaatttgtgtgtttaattatgttttgtatgtattatatagtgaacctatgaagatatggtttgatgcatgattattgatatgaataatcctacgagtaatcgttttttacaagacgacttgtctctcactgtagatcatatatgagttgttcttggatcattcgatgactgttgttgattgattcggtttttctgtgatgatatggtggaacttaataatgaaaagatgttttagatgcattattgatttgataatcttgaggagtaatcgattttaacaagacatatacgaattaacgaattattgcctttttatttgttagtttgatatgatttaggtataattcgtcctgtttgattcctttttctgtaatgatatgatgaacttaataacgtagagatgttttcgatgaattttaattttaatatttgttagtgtgattttgggtagaattcgttgtgatttgggtgtttgacttagtcactagttcatgtttgatgatcttacttagtacttcataatttgctttgtttctcattccagcccatctgatttaagttattgatggtataatttattgcttagggtattaatctgtttgtattttttaatccag

SEQ ID NO: 36 - DNA, 983 bp, Petroselinum crispum
gaattcgaatccaaaaattacggatatgaatataggcatatccgtatccgaattatccgtttgacagctagcaacgattgtacaattgcttctttaaaaaaggaagaaagaaagaaagaaaagaatcaacatcagcgttaacaaacggccccgttacggcccaaacggtcatatagagtaacggcgttaagcgttgaaagactcctatcgaaatacgtaaccgcaaacgtgtcatagtcagatcccctcttccttcaccgcctcaaacacaaaaataatcttctacagcctatatatacaacccccccttctatctctcctttctcacaattcatcatctttctttctctacccccaattttaagaaatcctctcttctcctcttcattttcaaggtaaatctctctctctctctctctctctgttattccttgttttaattaggtatgtattattgctagtttgttaatctgcttatcttatgtatgccttatgtgaatatctttatcttgttcatctcatccgtttagaagctataaatttgttgatttgactgtgtatctacacgtggttatgtttatatctaatcagatatgaatttcttcatattgttgcgtttgtgtgtaccaatccgaaatcgttgatttttttcatttaatcgtgtagctaattgtacgtatacatatggatctacgtatcaattgttcatctgtttgtgtttgtatgtatacagatctgaaaacatcacttctctcatctgattgtgttgttacatacatagatatagatctgttatatcattttttttattaattgtgtatatatatatgtgcatagatctggattacatgattgtgattatttacatgattttgttatttacgtatgtatatatgtagatctggactttttggagttgttgacttgattgtatttgtgtgtgtatatgtgtgttctgatcttgatatgttatgtatgtgcag

SEQ ID NO: 37 - DNA, 585 bp, Solanum lycopersicum
tgtcttttaatggataattactaattttagcggtactttttatttattatcatttataataatactatgttaaatatgcaacatgtattagaagtgaattaagtatgcaatagatatgtatttaaaaatatattatgcttgtttgataagaagttgatgcattgtattataagtacgttagaatgtgcaataaatatattatctatcattagaacttgaattataagtgaataatagattattttttgtaatatgaattaaaagtgtattaaacatgtattaacggtgatcaattggttaaaaaaaagtttattattaaaatgataaatctttttaatttatagtatatttatgtaagttttcacgttgagtaaatagcgaagaagttgggcccaaccaagtaaaataagaaggccgggccattacaattaagtcgtcacacaactgggcttcattgaaaaaagcgcaaaaccgattccaggcccgtgttagcatgaagactcaactcaaccagagatttctccctcatcgcttacagaaaaaagctatatgctgtttatattgcgaaatctaacagtgtagttt

SEQ ID NO: 38 - DNA, 352 bp, Medicago truncatula
atgcctatcttatatgatcaatgaggcatttaattgggtgcatatgatggtgaaaaaaggtgcagctcctggcttgggaatgatgactcatgtggaatttggtcttaaatttatcacatccttttgggatgtgatgattgtatcacttgttcattttgcaaagacaaggtgcactgctacaaactttggtttaatctgaaataaaacaaaactcactgagaggaagatgcatcccagtaggtgaaagtcgagaaggatttgcatgttactattacacttgctttttagtcccacatcgtctgaaacataaaatatttcagcgtttaaatacttcaagcgaaccagtaggctt

SEQ ID NO: 39 - DNA, 472 bp, Glycine max
cccgggttaagagaattgtaagtgtgcttttatatatttaaaattaatatattttgaaatgttaaaatataaaagaaaattcaatgtaaattaaaaataaataaatgtttaataaagataaattttaaaacataaaagaaaatgtctaacaagaggattaagatcctgtgctcttaaatttttaggtgttgaaatcttagccatacaaaatatattttattaaaaccaagcatgaaaaaagtcactaaagagctatataactcatgcagctagaaatgaagtgaagggaatccagtttgttctcagtcgaaagagtgtctatctttgttcttttctgcaaccgagttaagcaaaatgggaatgcgaggtatcttcctttcgttaggggagcaccagatgcatagttagtcccacattgatgaatataacaagagcttcacagaatatatagcccaggccacagtaaaagctt

SEQ ID NO: 40 - DNA, 445 bp, Arabidopsis thaliana
cttcgttgaacaacggaaactcgacttgccttccgcacaatacatcatttcttcttagctttttttcttcttcttcgttcatacagtttttttttgtttatcagcttacattttcttgaaccgtagctttcgttttcttctttttaactttccattcggagtttttgtatcttgtttcatagtttgtcccaggattagaatgattaggcatcgaaccttcaagaatttgattgaataaaacatcttcattcttaagatatgaagataatcttcaaaaggcccctgggaatctgaaagaagagaagcaggcccatttatatgggaaagaacaatagtatttcttatataggcccatttaagttgaaaacaatcttcaaaagtcccacatcgcttagataagaaaacgaagctgagtttatatacagctagagtcgaagtagtgatt

SEQ ID NO: 41 - DNA, 306 bp, Glycine max
aaaataaatggtaaaatgtcaaatcaaaactaggctgcagtatgcagagcagagtcatgatgatactacttactacaccgattcttgtgtgcagaaaaatatgttaaaataattgaatctttctctagccaaatttgacaacaatgtacaccgttcatattgagagacgatgcttcttgtttgctttcggtggaagctgcatatactcaacattactccttcagcgagttttccaactgagtcccacattgcccagacctaacacggtattcttgtttataatgaaatgtgccaccacatggattg

SEQ ID NO: 42 - DNA, 445 bp, Arabidopsis thaliana; identical to SEQ ID NO: 40

SEQ ID NO: 43 - DNA, 323 bp, Arabidopsis thaliana
ccatggatgttgttgttaccagaaagtaaataaatgttcaatctctgatgttctcaagtaagtgagttttattgggaataatattaacttatgttcttcttgcatttgatttctttgccgctctcttcttctatcttaaatctgtgtatactatttcactattgggctttttattagtctataatgggactcaaaataaggctttggcccacatcaaaaagataagtcacaaatcaaaactaaattcagagtcttttctcccacatcggtcactgtactcattttgtgtttgtttatatattacacgaaccgatctttggtac

SEQ ID NO: 44 - DNA, 1982 bp, Zea mays
caattaatgcacgtcggcccagtaactcccgtcggccagacagggccgacatgcattaatttgtaatccccgtcggccagcggtagccgacgggagttactcggccgatgtgcattaattggtaatccccgtcggccagccgtagccgacaggaattactaattcccgtcagtgcccgacgagaataagcatatccccaacatctgatgcccgtcggcttagggtcgacgggaattaaccatataccgacgagaattagtaatccctatcggtttagtgcttattcccgtcggttctgagtcggcgggaattaattggattcttgtagtgatgcactgagtttttactataattttaacaagtaaaatgactaacttggataaaaaaatgtttcgtggggcgggtacatggggaacgtggacggtcctcgtgaactacggggattaaattttctccatttaaatccccgcggggactaaattagtctcatacccatcccctaataggggaattttccgcggggaattggggatcgagtccccattgtcatctctactctgcgcacgtctggatggtcgcgcctggggcccgaacggttcacgatggcgcagagggtcttatttttcacagcagacctagatcttgcctctcgggagggatcccgtcggggaggagagatcctagggtgtgtcttggtgtcagcaggccacccaagacgcttctaatcgatgtagaaccgaagaaatgcgaagatttaaggtagaggaaggctaaactagagctactcctaatacaaaatgtaaaaacgataagtaaatttgatctgatcgaatgtgggggttcaatcggccgtagccctttatatatataaatgagagatctgaacccgttacatgtcgtttaccgagttaatctcgtagatttagctaacaaatcccacaagaaaatcgaaatcctaaccgattctacacacaagcggaccatccatgccatcaccgcggatcatccggcctagcgtcccctgcccaaaagtgggctcaacaagcctaaatacatataatttataccacgtgcaacacatttattcatccatatcacatgtcatgcaaggcataagcatcatgttaacttagttatactgacatacatttatgagttgagatgtccaggatgtgagcgcatgagcccattgtccattcaggaccaagacaggctactaagcactttctacataacttgtatgtgctaactatagcatgcttatatggctctctccaaagttcaaagctagctcaaatcttttgatttaataaaacttaaatttgtttgatttcagataaactgataatttttataatatttagagtgagttgaaaacagaaactggccgcaaatccacctcaagccttttgatttgacctaaaaaaaagaagcccccacaaacaccactccacactagtgcactgtctctctccaaaggcagctgcattggcctccagccttttccctactgtgccgcgcgccctcccttctctctaatgatagcatagggagagaaggcatactccgaggcatccttctcctttccctctccttccccaaacccttttcctctttccctcgccccaagaacttcatctcatctccaggcgccccttttgcgcttgcgcaggagtagctcacggggacagtgggcggatagctcgatcgctgcaccactacttcactggaggtccgcccactccctaggcaagcaagactagtagccgcagtctaacaatagctctcctgcttccggttcagctactgctgctagcgaagtttggccacatctgatgtcaagagcatggcgcatgcacatactttctgcttgcttttacatagcatactatagtttatgcatgctgctcatgtagacatgtgcatctggtgttcggaactttctcaaacggccgtgggtgtttgcaggtgggggcaaaacc

SEQ ID NO: 45 - DNA, 2051 bp, Oryza sativa
tgggccaatgaatccgtgtgatcgcgtctgattggctagagatatgtttcttccttgttggatgtattttcatacataatcatatgcatacaaatatttcattacactttatagaaatggtcagtaataaaccctatcactatgtctggtgtttcattttatttgcttttaaacgaaaattgacttcctgattcaatatttaaggatcgtcaacggtgtgcagttactaaattctggtttgtaggaactatagtaaactattcaagtcttcacttattgtgcactcacctctcgccacatcaccacagatgttattcacgtcttaaatttgaactacacatcatattgacacaatattttttttaaataagcgattaaaacctagcctctatgtcaacaatggtgtacataaccagcgaagtttagggagtaaaaaacatcgccttacacaaagttcgctttaaaaaataaagagtaaattttactttggaccacccttcaaccaatgtttcactttagaacgagtaattttattattgtcactttggaccaccctcaaatcttttttccatctacatccaatttatcatgtcaaagaaatggtctacatacagctaaggagatttatcgacgaatagtagctagcatactcgaggtcattcatatgcttgagaagagagtcgggatagtccaaaataaaacaaaggtaagattacctggtcaaaagtgaaaacatcagttaaaaggtggtataaagtaaaatatcggtaataaaaggtggcccaaagtgaaatttactcttttctactattataaaaattgaggatgtttttgtcggtactttgatacgtcatttttgtatgaattggtttttaagtttattcgcttttggaaatgcatatctgtatttgagtcgggttttaagttcgtttgcttttgtaaatacagagggatttgtataagaaatatctttaaaaaaacccatatgctaatttgacataatttttgagaaaaatatatattcaggcgaattctcacaatgaacaataataagattaaaatagctttcccccgttgcagcgcatgggtattttttctagtaaaaataaaagataaacttagactcaaaacatttacaaaaacaacccctaaagttcctaaagcccaaagtgctatccacgatccatagcaagcccagcccaacccaacccaacccaacccaccccagtccagccaactggacaatagtctccacacccccccactatcaccgtgagttgtccgcacgcaccgcacgtctcgcagccaaaaaaaaaaaaagaaagaaaaaaaagaaaaagaaaaaacagcaggtgggtccgggtcgtgggggccggaaacgcgaggaggatcgcgagccagcgacgaggccggccctccctccgcttccaaagaaacgccccccatcgccactatatacatacccccccctctcctcccatccccccaaccctaccaccaccaccaccaccacctccacctcctcccccctcgctgccggacgaccagctcctcccccctccccctccgccgccgccgcgccggtaaccaccccgcccctctcctctttctttctccgttttttttttccgtctcggtctcgatctttggccttggtagtttgggtgggcgagaggcggcttcgtgcgcgcccagatcggtgcgcgggaggggcgggatctcgcggctggggctctcgccggcgtggatccggcccggatctcgcggggaatggggctctcggatgtagatctgcgatccgccgttgttgggggagatgatggggggtttaaaatttccgccatgctaaacaagatcaggaagaggggaaaagggcactatggtttatatttttatatatttctgctgcttcgtcaggcttagatgtgctagatctttctttcttctttttgtgggtagaatttgaatccctcagcattgttcatcggtagtttttcttttcatgatttgtgacaaatgcagcctcgtgcggagcttttttgtaggtagaa

SEQ ID NO: 46 - DNA, 842 bp, Oryza sativa
tcgaggtcattcatatgcttgagaagagagtcgggatagtccaaaataaaacaaaggtaagattacctggtcaaaagtgaaaacatcagttaaaaggtggtataaagtaaaatatcggtaataaaaggtggcccaaagtgaaatttactcttttctactattataaaaattgaggatgtttttgtcggtactttgatacgtcatttttgtatgaattggtttttaagtttattcgcttttggaaatgcatatctgtatttgagtcgggttttaagttcgtttgcttttgtaaatacagagggatttgtataagaaatatctttaaaaaaacccatatgctaatttgacataatttttgagaaaaatatatattcaggcgaattctcacaatgaacaataataagattaaaatagctttcccccgttgcagcgcatgggtattttttctagtaaaaataaaagataaacttagactcaaaacatttacaaaaacaacccctaaagttcctaaagcccaaagtgctatccacgatccatagcaagcccagcccaacccaacccaacccaacccaccccagtccagccaactggacaatagtctccacacccccccactatcaccgtgagttgtccgcacgcaccgcacgtctcgcagccaaaaaaaaaaaaagaaagaaaaaaaagaaaaagaaaaaacagcagggggtccgggtcgtgggggccggaaacgcgaggaggatcgcgagccagcgacgaggccggccctccctccgcttccaaagaaacgccccccatcgccactatatacatacccccccctctcctcccatccccccaaccct

SEQ ID NO: 47 - DNA, 1973 bp, Panicum virgatum
cacgtcagtgtttggtttccactagcacgagtagcgcaatcagaaaattttcaatgcatgaagtactaaacgaagtttatttagaaatttttttaagaaatgagtgtaattttttgcgacgaatttaatgacaataattaatcgatgattgcctacagtaatgctacagtaaccaacctctaatcatgcgtcgaatgcgtcattagattcgtctcgcaaaatagcacaagaattatgaaattaattttacaaactatttttatttaatactaataattaactgtcaaagtttgtgctactcgcaagagtagcgcgaaccaaacacggcctggaggagcacggtaacggcgtcgacaaactaacggccaccacccgccaacgcaaaggagacggatgagagttgacttcttgacggttctccacccctctgtctctctgtcactgggccctgggtccccctctcgaaagttcctctggccgaaattgcgcggcggagacgaggcgggcggaaccgtcacggcagaggattccttccccaccctgcctggcccggccatatataaacagccaccgcccctccccgttccccatcgcgtctcgtctcgtgttgttcccagaacacaaccaaaatccaaatcctcctcctcctcccgagcctcgtcgatccctcacccgcttcaaggtacggcgatcctcctctcccttctcccctcgatcgattatgcgtgttccgtttccgtttccgatcgagcgaatcgatggttaggacccatgggggacccatggggtgtcgtgtggtggtctggtttgatccgcgatatttctccgttcgtagtgtagatctgatcgaatccctggtgaaatcgttgatcgtgctattcgtgtgagggttcttaggtttggagttgtggaggtagttctgatcggtttgtaggtgagattttccccatgattttgcttggctcgtttgtcttggttagattagatctgcccgcattttgttcgatatttctgatgcagatatgatgaataatttcgtccttgtatcccgcgtccgtatgtgtattaagtttgcaggtcctagttaggtttttcctactgatttgtcttatccattctgtttagcttgcaaggtttggtaatggtccggcatgtttgtctctatagattagagtagaataagattatctcaacaagctgttggcttatcaattttggatctgcatgtgtttcgcatctatatctttgcaattaagatggtagatggacatatgctcctgttgagttgatgttgtaccttttacctgaggtctgaggaacatgcatcctcctgctactttgtgcttatacagatcatcaagattatgcagctaatattcgatcagtttctagtatctacatggtaaacttgcatgcacttgctacttatttttgatatacttggatgataacatatgctgctggttgattcctacctacatgatgaacattttacaggccattagtgtctgtctgtatgtgttgttcctgtttgcttcagtctatttctgtttcattcctagtttattggttctctgctagatacttaccctgctgggcttagttatcatcttatctcgaatgcattttcatgtttatagatgaatatacactcagataggtgtagatgtatgctactgtttctctacgttgctgtaggttttacctgtggcaactgcatactcctgttgcttcgctagatatgtatgtgcttatatagattaagatatgtgtgatggttctttagtatatctgatgatcatgtatgctcttttaacttcttgctacacttggtaacatgctgtgatgctgtttgttgattctgtagcactaccaatgatgaccttatctctctttgtatatgatgtttctgtttgtttgaggcttgtgttactgctagttacttaccctgttgcctggctaatcttctgcag

SEQ ID NO: 48 - DNA, 2119 bp, Oryza sativa
ccgtcaacaaaagaaatcaaaagggaaatgcaccatcttatatctccagtttatatgaacagattggataagatcataagatcaagtggtttatattattttgaggaatataacatggattcatcctaatcactcgtctaggcagtatgtgtattcatgatggatatggtactatactacggagttttttcttcacaaaataacctgttattttgacctccaaccaaacacgaattataccaaaaattgggttatttcatctatagtacaactctattataaacatgcagtaaattatcctacacatataccaaaattcaagtgtaataatcctaatacacagacttaaaaaacaaactatttcctttttaagaaaaggaaaaccatttttttaacggaaggaaaacaaattcgggtcaaggcggaagccagcgcgccaccccacgtcagcaaatacggaggcgcggggttgacggcgtcacccggtcctaacggcgaccaacaaaccagccagaagaaattacagtaaaaaaaaagtaaattgcactttgatccaccttttattacctaagtctcaatttggatcacccttaaacctatcttttcaatttgggccgggttgtggtttggactaccatgaacaacttttcgtcatgtctaacttccctttcagcaaacatatgaaccatatatagaggagatcggccgtatactagagctgatgtgtttaaggtcgttgattgcacgagaaaaaaaaatccaaatcgcaacaatagcaaatttatctggttcaaagtgaaaagatatgtttaaaggtagtccaaagtaaaacttatagataataaaatgtggtccaaagcgtaattcactcaaaaaaaatcaacgagacgtgtaccaaacggagacaaacggcatcttctcgaaatttcccaaccgctcgctcgcccgcctcgtcttcccggaaaccgcggtggtttcagcgtggcggattctccaagcagacggagacgtcacggcacgggactcctcccaccacccaaccgccataaataccagccccctcatctcctctcctcgcatcagctccacccccgaaaaatttctccccaatctcgcgaggctctcgtcgtcgaatcgaatcctctcgcgtcctcaaggtacgctgcttctcctctcctcgcttcgtttcgattcgatttcggacgggtgaggttgttttgttgctagatccgattggtggttagggttgtcgatgtgattatcgtgagatgtttaggggttgtagatctgatggttgtgatttgggcacggttggttcgataggtggaatcgtggttaggttttgggattggatgttggttctgatgattggggggaatttttacggttagatgaattgttggatgattcgattggggaaatcggtgtagatctgttggggaattgtggaactagtcatgcctgagtgattggtgcgatttgtagcgtgttccatcttgtaggccttgttgcgagcatgttcagatctactgttccgctcttgattgagttattggtgccatgggttggtgcaaacacaggctttaatatgttatatctgttttgtgtttgatgtagatctgtagggtagttcttcttagacatggttcaattatgtagcttgtgcgtttcgatttgatttcatatgttcacagattagataatgatgaactcttttaattaattgtcaatggtaaataggaagtcttgtcgctatatctgtcataatgatctcatgttactatctgccagtaatttatgctaagaactatattagaatatcatgttacaatctgtagtaatatcatgttacaatctgtagttcatctatataatctattgtggtaatttctttttactatctgtgtgaagattattgccactagttcattctacttatttctgaagttcaggatacgtgtgctgttactacctatctgaatacatgtgtgatgtgcctgttactatctttttgaatacatgtatgttctgttggaatatgtttgctgtttgatccgttgttgtgtccttaatcttgtgctagttcttaccctatctgtttggtgattatttcttgcag

SEQ ID NO: 49 - DNA, 1830 bp, Oryza sativa
gttatcacgtcggcacgccgacgtcgctgcgcctgcgcgtgggaggccagggcagatgctacgtgccatcaggaatgtcgacctgatgattattttgttgatcatgattttcttttggctatttgattttttgaaagatatttttttccctgggaagacacctatgggacgaagatattatgtttcttatatagcaccaaacaaatttaatatatatatatatatatatatatatatatatatatatatatatatatatatatatatatatatatatatatatatatatatatcacatcagtctctgcacaaagtgcatcctgggctgcttcaattataaagccccattcaccacatttgctagatagtcgaaaagcaccatcaatattgagcttcaggtatttttggttgtgttgtggttggattgattctaatatataccaaatcaatataattcactaccaaaatataccatagccatcacaactttattaattttggtagcttaagatggtatatataataaccaattaacaactgattctaattttactacggcccagtatgtaccaatacaaaacaacgagtatgttttcttccatcgtaatcgtacacagtacaaaaaaacctggccagcctttcttgggctggggctctctttcgaaaggtcacaaaacgtacacggcagtaacgccgcttcgctgcgtgttaacggccaccaaccccgccgtgagcaaacggcatcagctttccacctcctcgatatctccgcggcgccgtctggacccgccccctttccgttcctttctttccttctcgcgtttgcgtggtggggacggactccccaaaccgcctctccctctctcctttctttatttgtctatattctcactgggccccacccaccgcacccctgggcccactcacgagtccccccctccccacctataaataccccaccccctcctcgcctcttcctccgtcaatcgaaccccaaaatcgcagagaaaaaaaaatctcccctcgaagcgaagcgtcgaatcgccttctcaaggtatgcgattttctgatcctctccgttcctcgcgtttgatttgatttcccggcctgttcgtgattgtgagatgttgtggttagtctccgttttgcgatctgtggtagatttgaacaggtttagatggggttcgcgtggtatgctggatctgtgattatgagcgatgctgttcgtggtccaagtattgattggttcggatctagaagtagaactgtgctagggttgtgatttgttccgatctgttcaattagtaggatttagtctctgtttttctcgttgatccaagtagcagcttcaggtatattttgcttaggttgtttttgattcagtccctctagttgcatagattctactctgttcatgtttaatctaagggctgcgtcttgttgattagtgattacatagcatagctttcaggatattttacttgcttatgcctatcttatcaactgttgcacctgtaaattctagcctatgttaattaacctgccttatgtgctctcgggatagtgctagtagttattgaatcagtttgccgatggaattctagtagttcatagacctgcagattatttttgtgaactcgagcacggtgcgtctctctattttgttaggtcactgttggtgttgataggtacactgatgttattgtggtttaggtcgtgtatctaacatattggaataatttgattgactgatttctgctgtacttgcttggtattgttataatttcatgttcatagttgctgaccatgcttcggtaattgtgtgtgcag

SEQ ID NO: 50 - DNA, 2212 bp, Aegilops tauschii
tgcagcgtcccggtgccgtcggagcttgccgcgactactgtggagatccgagggagcttcaatggagtgtgtcaagggctgcaatggagcgccgccggggtcgttggagcttgtcgtggattcaagctttcaccggagctgcaatggagcgccgtcggagcttgaagcttttttcgcgccgcagtgcaacaccgccgtctatgtgcaactttccgcctgtttcaatgaagcaccgttgttcgtgacacctggtgcaacgcggcattgccgtcggacgcacgagctgagagggggtgccatggcgctaccaaccagggatgttgcttttctctcccaacgcaaccacaatctgctcagctccccacatgcagcaagctcacatgccgcacctagcacaccgcgacacgaccacgtgactgctactatcgggggccatggccagcgagctcaagggttggggcagccatatgccctgcaaagctcaagggttgtggcggtcatggcatgtgagctctggggcgagtcgttataggcggcgctacaaccgcggaagctgactgctacaaccgtggtgaccgtgtgtcgtgacccccagtggggctatgctgcgaccgtccgggtgagaagctacgcccccagccgaagatgttccgactgacatgggcgggggaggggagcacgggcgggcggcgcagcaatcgtcggcgacaggaaggtgcaaacctcgacagccatgctacaaccttccaatatctggagctggagacaagaaggttaccggtgtggtgctcagatcggccggccgatgcagagcactgtccaaggcgaatacaaattcgagtcaaaattgtgacaacacagtaggcgtggccgtacgagttcgagtcacgcatgactaacgatgctcacgcaccgcaccaacggcgtgagcgcggcgtccaactccaacggccaccaaccagccaaatccccaacagcaccaaacgacgtcacctttggaatctcctcccctattctggcttttgcgaccgcctctctctcctccgcctgcctatccgctccatcctccacacgtcaggcgtgccgtgtctcttcttccttctctccctccctcccgtccgagcctgctataaaatccctgccccctcccgtctcctctccacacatccgatccaatccaatccagtccccgtccaatcgaagcgaagcgaagcgaaggctctctcgtcctcctcctcaaggtatgcgatgcgagcctccgattttctctccgccttctcgtcatgtgcgtgcgtgccccgggatcattgataagactgccctgatcgattattggtggttcccctcgattcctgttagtaggttggagtagatctgcgggcgggccgagtctgttatagtcgactgattgctgctggttcgctcagtcgaggttgattaagtctcgattttagattaatctctctcgattatgcctggattttcgagtagatctgccgattgggatgcgatttttcttggtttcgtccatctatatatatgctgtggttagctatgtctgctggttgttgataaatcgtcgcagtattcttggatttacgattttgtacccctcgtatcacaccagcaatttgctgttgctaacctttgcttgctgtacgctgtgcatcgactttttaccttcatattgctcccacaaggctaaagattgcttgtagatctgctaatatatttctgttgagttctgctaagatttagcactgcatgctctgaaatccgtttgcttagtctagcggattctttgtactgtggcctcgtttatctatagattgacttactgcagatttcattattcttgtggtttcggccctgtagctacttgtttagtcttttgattcaactcttaaatacatgtgggtttgatgatgttactgttaatacgtccatgacttgaccagcttattctgtttaactgactaataatatatactccccatgaccatgaggctagagatttcactgataataaatctgctaatatatttgtggtaggggttcttccaaaagttagcatcgtcaatcatttgattagcttattctaagggattccttagttacaattccatctctgttgtataatccggttcatgtattgttacagatttctctgtaccgtttctaactctggttctgtgtgctttgttgtttacag

SEQ ID NO: 51 - DNA, 2452 bp, Panicum hallii
aatcgttggtcaactttccttccattactttttaatacgtaacaattatccctaaagcctaattaagtaattcaacttccgaattcaataggggatcatctgggcacgacctaattgaaaggataacaatagctttcaaacaacatttccacttgtggtaagatttaaggtcttaacattgtatagttgtttttctcacggccctagacttgagaaagggaccttttgatatcgttattgtgctccataatttttagttgggacaaatgtaatttcttatatttacgataaactcgattctaatgtattgataactccaatgccgtgtccatttatggtgttatcatttgtttcctgatttaaagaaaaaatataacacacaaaaaagatgattttggaagtttacaatcacgttcaccattactctctaccatatcttggcgttgttgccaagcgtatctagtaatttcattcttgaaagcctctagctcttaaacgtaatttatgatacagtactatattttttttattaagggcaaaagatcgagaggtaaatggtctgctccgtaaatttatcttacatagaggctttaaaaagaaatatcatgtaaaatcgcttttgttagaagcaggtcatgcataaccttccagggacatgccagttgttagttgcttttttttagtttctctttcttttacctgattataatcttttaaagttatagtcttgtatttctaatatagaaacgcatacgtgtgcgccgttgttaaaaacaaagagatcatgcatgattgaagcatcaccataacgacgttaatcttccgtccagccattaacggccaccaaccgcaggaggcaaacggcgtcaccatcctcgatatctccgcggcggccgctggcgttttccggagaaattgcgcggtggggacggattccacgagagcctctcgctgctgggccccacatcaatggcgtaacctcacgggacgcttcctccctcctgcggccctcccccgcgtataaatagcacccctccctcacctcttcctcatccagtccccaacccgtcgagaaattctcccgagcgattgcaatcgaagcgaagaggtctcccccgatcctctcaaggtatgcgagtcctcgatccccttccgatctatctcgtttctcgcgtgctctccctgctcgtgttcgtcgtcgatctagtttagggtttgatttggttctgaatcgttcccttttcctgcttgcgttcgatttgtcgtcgattctcgggtagatgtgtggatctgcggggcgtgatgaggtagtttggtgtagattcgtgttgggcgttcaatttgcctctagggttcggctgctgttggcatgcctgtgatcgagcggccggataggattagttttttttatatatatatgttggatgcctgatttcctgtatgttgggttagattgctggtacgattcatctaggcggtgctttgcagaggaacagccttgctgtttagtatttggtagctctttctacattgattacttttgatcatagcctgataatgatcaccgattggtgtggaattaattatttcattgtcgaaagcatagctgatgtagatatagctgcacaatttcttccttggctccttactgtctaaattgtagagtatactgagttactgcttctttatcagtttctctggattgttgtatccagttaggccagtgttgtcaaaatttgacatggtagttcatctgaaatttctccggactgttggtatgctcgtggccagacttaattgattaggctgttcttcatgttggatcaccccatggtttgtgatacctgttgggttagattgttggttcgattgctgtttaatcttggtagcttcatctagatttgtacaacttttggtcacctgatgatgatcaccgattgttgtagaattagttaattcattgttgatctaggtgtggaattaattagttaattgttaatctatggcatggctcatgcagatattgatgcaaattttcttaactggttccttgcttcagtgtgtatctgtttgtctgtgttttaggccacatcatatgattgtcaaaattttaaatggtagtttaatgataaatgtagttcagcttacttcagtgttgatttgcttcaaatgtagttttctgtcctattgaacatagaatcttcatgagatgttaatgtattctcttgttcagaattgatctgtttcaatatcacaatattatgtgtcctgtaaagttttttagtatgatttgttttaaatttagttagcctatcctgttaatataggatgatgagccgtgagatgttcattctcttttgttcagagctaatcattttcaatgttgcaatgttctgtgtctagctggatgcttacggtggtttaactctcttctgttccttaatgtttgcag

SEQ ID NO: 52 - DNA, 1783 bp, Zea mays
gtagattacgttggttaaatatatatgaatgtgaaacaacaactaaaatttgaactattaattatgtataattttatcttatttttatataaaacagagaggagaggagcgatgactgtggcgtgtgggaacgtggaaactcgctggcccatctcgaataattttgctgcacttctaataccttcacgagtctgcacaagcatagattggtgctggttgaacggccctgattcttttttttcatggctctgcgttcgagagcatgtttttcgttgaaggcttctttggttagaagtgacctgagtgaattggagaggattagaggcatgtttggttcactacctcagttgctacattttgcctaacttttctgcctaaggttagttattcaatttgaacgactaaccttagacaaagtggggcacatttagccacaaaccaaacaggccctaaatctatttatatttaattttaaatatgaataaatttaattctattaatctttgtcgagtgttctttgccgagtgttacactcggcaaagcctttgccgagtgtaaaatagcatttgccgagtgtgttagacactcgacaaagaacgcgattccggtagtgttaatttcctctagtttttatacaacaaagcataagaggatatatttcttttcttttactttgatgaaacaatttggttcttttggacgagccaaaacccggatatggtccaattaagaccttattcgtttgtccaaaaatgtaacaggaatcatttcagatgatcaaaacttatataaattagagaaacaaatcggctaggaattatttcatatctccattcctgaagaaacgaacggtcctaaggctccaagcacgggtctatacatcaggttgcgccggtctaagcccgcacaacattgggtcgggtcgtgttcaagcattaatcgtggtatagactggaccatcgtgtcacgggctatataatacatttgagaatgtagaattaaatacatactccccgactctaaatgacatattcatatacgaggatggtacttctttggactatatagggacggaggtcgggagggaattcgcgagagcaagaaagcagctacggtagccatgcatgaccatatgaaagcgacgacgcgagaggatgtatggtttgggctgcttaaatacaatctgcaatagactgtgctgcattgcacattattcttatgaaagagtgtgtttcatctctatttatgttgttttggataaaatgttttgtttatttatgaaggacatatttccttatcaataattcctacgcccaaattaaagaagccctggaatcaggaactaggaaggggcaccgatgtgattttgtgagccaacgacatggggagcatgagcgtgagcaatgcatgtttgccgagtcaaacgttgccccaccaacaagcaagtgcgtcgtgcgtggatcctctccttcctctctcttggttcctgttatctctctcggctgtccactcccccgtgatgtgagcgcgtttctctcccgtcctctcctctcctcccccgcaacaaactcctgcaagctgctctcgatctctctctccgtcgccatctctctcgcgcgcgcattacttgcacgtacgtgctcagaaggaaggcagaggcaaaagcagcctaggtgatatgatacctcctcctcctcctcccattagctcctccgcatgcatcatgcatgggtacgtgcgcgtgctacattttatttgaaatgaaatggctggttgtctgcag

SEQ ID NO: 53 - DNA, 3710 bp, Zea mays
gcccgacaagaaagctaatgggctgggctgccaaccatgtttactaggctaggctcattcggatgctagccaatcgttcctgcactgaggctctagatttcatagatagctaatgggctgggctgccaaccatgtttactaggccataaaatgaacttttggtttgtttaataatattatgccgggttttagaaacccatgggtttgcgggtatgggtactaggatcccatactcgtaccctcatacccgctgggtttagcttatcacccattaagaaacccgtgggtttggatattagcccgtacccgtcccctaatagggtaaaaacccaccgggtttcgggtttcgggtacccattgccatctctacctgtcaatgacccatttaaatagagcccatcgaagcccactaaatatttaacatttttgagctagttgtactttttccttttttaacccaaatttttaatgtggcacccacaaacaacccaattttattttggttatatatgttatgtacttttatttatgttatttcatgtgatttgtgctaacctgacacattaattttgggttaattaagttggataggcacacttaagtattcatgggttgtgttttggatcgacggcttgacgtcttggtccacgggctggcacaccacgacccgtaattgaaattgtactttagtggactgtgccttagtggattgtgctttaataagcctggggtgtaccatattgggctgatccagatatacatgtacaccggggagtatttatctttgacacaaggagtatttacttattatgaaaccagctccaaaaagtggcttctgagcctatccacgtcgtccattaatctttcgaccgtaggatcggattccaacggctacacgagtgttctcacgcaccaggcgccaggcggcctcctcatgctggataaatcgtgacgcttccagatgatacatctccctcttggctgccgggcggcactctccatggtgaagagggtgtcgaccgcgatggctacaacgacgacgatggagcacttgacgcccccaacagatgcgagccattctcctcctccctacgtcctttccccctccacgacaccataaccgtgcctgctccgccgaatctaaaggtgtcaggatccccaatccttcccctcctctccccctctccacgacgctgcaactgtgctcgcatcgccatcccctcccctcccctgtctccaagccaggaatcccatccccaccccaatgtcgcagttctgctcgcgttggccggatctgtgaatgaagaacccacggttccacgacctcctcttcgtggaagcctaaaaggcatcacccccataagcgagagggaaaagacacattcctatatattctcttagtttgtccgctgttgtctagaaacatcatgtaatgaggctgggaaacgatcccacggagtgctcccgtgtccgtcgcctcggttcggcagaggccagcaaccgcggcacctggtccacagcagcagccaccacgactcgctagggctaggccgacctagatgatatgcagtgagctgatgggagggatgggcgagcaagaattggtacagtaaccggaagacgatcttgatttattccttatgtcatgaattcctttttatttacacccacactttctaactttcgtacaatgattcgtatatttaaaacaaggctaacttatgttctcatgctttacgaaccctggcatatgtcgcaaaaaatccttacctaaagaactaactctgcagcctcttcaagctctagatttcaattcttatggcctaagaagtgtttttttatttcataatataagctttcacaacaatctaattcttggagtcagattctataaatacccaacatttactaacctacatttttttttcaattggtgccatgaccatcacataatgttgatgagctattccctccaagttgctgattgcatgtggattaccatgcatggctatttgctatttggttgtctcgacctttcttaggatctattggatgtaatacatattatcattatttagctaatatttgctaactactacctagcagagtggatagtaggttgtggtgtttatatccataactaatgggttaattaataattggagagtaatgttcctgttagcccccattgtttgggtagatagtaagataatggggatttagaaacaatctaaagtttattacaatctgttatctagacctatttatatccatagagctaaagtttagcagattgctacatcctcattattagtttggagccaaacatgtcctgattgtataatttaaatgtttataggagtaaccaatttgttttagctttgctattttacgagtgtcaagatgcttaactatttcatacttgctttgtaggaatgttcgatgccgacaacatcttgctctaccagaaggtaccagctccaaatcaagaaccaaaatttaggaaaaatacgaactgcaaccttatccgtcatctttagtaattcatgtgtttatcttatttgcaccaagaactatgctggaggctataaaactatgaatgttatttgtgacatgtaaataatactagcttgtacatgcatctaaatgcatataagaaacacaatgcaccttttgtttgcattccatgtaaattataaattaaatccaaacattgaaaaattacaaaacacacacacacaacactatgcgcgcatgggcgcgcgcaagacactagtacataataataacgatattgttcgcttcggattaaattaaaccaagcgagtatgcgtgcatgtgtacgtcggatgctttgtttgttcatttgtggcccgtgaagtaatatttgggcccaatagcccattcatccatgtcctaaccctagggcgcgttccttataaaacctatctccattctgttctcactctcagacaccagacgcagtcggctgccgcagactggtagtagcccgcgcgccgtcaccgtatcctcagatcagaggcgagcagaaaccacaccactctactgacgcccgacgaggtacacttccgcgcgcgcgcttctcttccttcttttttcgctcgacgaggtactctgcttcacgcgcgggcgcgcttctcttccttctcttttcgctctgccttgagcctgttcgtttgatgcccagatctactaggtttgtcgatcgtcgttatgtgtgatgagctgagccgattcatgcactgtatttttaattaagtgtttttttcctccgccgctacctttattgtctatgtatgaacttgcagcttacaactggttattgagccataaattgtaactgagtttccgagatctataatattacgtggctgaggcgcttcatctctgttttgtttgtatgacagtaggagtactaatccaagtttagcttccgcttcttcatctacctttagtatgtatttcgtatataaatacgattgcagtttgcaactgattctcggccatagatgattaccgttgcgttgttcatcgggtctagtttcggatctctgatgttgtgtgggtggggtacttcgacttgggttttcctgccctttgtttgattactggtttattgacatatatttatctattgactttttatctgctatgtttgatgtaagcagcagtgtaacattttcctgcag

SEQ ID NO: 54 - DNA, 1645 bp, Zea mays
caaagggcttttggtcatcagccgggagcgcctccatggccggcttgatgatgttggtagtggagatcttggtgtgatccttaaaaccggccatttatgggccgatttttagcagatctagacacctattccccagcggagtcgccaaaagtatgttgacgctttttcggagcgccaatcactcaagaagaaccggcggcggtgccctctgcacaggggcggacggtccgcgcgcaggggccggacggtccgcggcctggtgcgaggcggcggcgctctctggttagacgcggacggtccgcggcacagggccggacggtccgcgacctagtgcaggtgctcgggttccctgcctgacggccggacggtccgcgctctagggccggacggtccgcgcgtgcgcaggggcggcggaagatcgccggcggcgcctggatctcgctcccgggagggaccccgtcggggaggagagatcctaggagttgtctaggctcgggccggccgacctagactcctctaatcgacgtagagtcgaggagaggcagagaatttggggattggaatactaaactagggctaaactagaactagactagaactactcctaattgtgctgaaaataaatgcgagatagaagttgtattggttcgattgttgggggtcaatcggccgtagcccttcatctatataaaggggaggtctggatccgtttccaactgatttccgagttaatcccgcggttttaggtaacaaatcccgcgagaaactaggaaccctaactgactctgcgcacgcgcggaccgtccgcgccaccaccgcggacggtccggaccgcggaccgtccggcctccgggccggaccgtccgcacggtcattttgggttcgaacagagtcccaacgaggttagtaaatgtagtgatgaaattaagttttgtacgaagtttgtaaatttaaggacctgttttacataactattggagaagagttttctctgaaaaattcttaaatttatatttagggagttgtttatataactattggcatttgagatgctctaaggaagcgaaggaaataacttggcggcgatcctagtcgacaaccgttgaattcgtgagaatcaatcattctgtaggagtaaaaaaataaaataaaatatgcatttcctcgttcctatacgcttaaattagacgaccctggactggaaccaggaactaggaaggggcaccgatgtcatttgcgaagcaacaacaacatgcgtgaggacgaccaagtcaaacgttgcgtcgcgttgcctcgccggcgggccggtcccaccaagacgtggcgccatgcaagtgcgtcgtcgaccctcttctctctctctcttgtagtcttgttcctgttatctctctcggctgtccgctgccccgtgatctgagcgcgtttctctcccgtcctctcttctccctctcccgcaacaaacacctgctatccgctctccctctcccctgccatctctctctatcgcattgcttgcgcgagcgcagaaggcacacacgtacagcctaggtgatacctcctcctcctcctcctcctcctcctgatctcctctcctcctccggcctccgtatacctataactaaaagatgatcatcgtgcgatgcag

SEQ ID NO: 55 - DNA, 899 bp, Zea mays; identical to SEQ ID NO: 18

SEQ ID NO: 56 - DNA, 807 bp, Hordeum vulgare
gatctcgatgtgtagtctacgagaagggttaaccgtctcttcgtgagaataaccgtggcctaaaaataagccgatgaggataaataaaatgtggtggtacagtacttcaagaggtttactcatcaagaggatgcttttccgatgagctctagtagtacatcggacctcacatacctccattgtggtgaaatattttgtgctcatttagtgatgggtaaattttgtttatgtcactctaggttttgacatttcagttttgccactcttaggttttgacaaataatttccattccgcggcaaaagcaaaacaattttattttacttttaccactcttagctttcacaatgtatcacaaatgccactctagaaattctgtttatgccacagaatgtgaaaaaaaacactcacttatttgaagccaaggtgttcatggcatggaaatgtgacataaagtaacgttcgtgtataagaaaaaattgtactcctcgtaacaagagacggaaacatcatgagacaatcgcgtttggaaggctttgcatcacctttggatgatgcgcatgaatggagtcgtctgcttgctagccttcgcctaccgcccactgagtccgggcggcaactaccatcggcgaacgacccagctgacctctaccgaccggacttgaatgcgctaccttcgtcagcgacgatggccgcgtacgctggcgacgtgcccccgcatgcatggcggcacatggcgagctcagaccgtgcgtggctggctacaaatacgtaccccgtgagtgccctagctagaaacttacacctgc

SEQ ID NO: 57 - DNA, 1084 bp, Hordeum vulgare
gggcaagttaaaggccctactggtggcatgggtgggcaggctgaagaccctactagtggcatgggtggggagctccctgccaccatgtaatggaacctttatgatttactaccctttatgttgtgtgtgagtgtgacagagaaacctttctctgccttattaataataaataaagcacatcacttgtgtgtgttctgaaaaaaagatctcgatgtgtagtctacgagaagggttaaccgtctcttcgtgagaataaccgtggcctaaaaataagccgatgaggataaataaaatgtggtggtacagtacttcaagaggtttactcatcaagaggatgcttttccgatgagctctagtagtacatcggacctcacatacctccattgtggtgaaatattttgtgctcatttagtgatgggtaaattttgtttatgtcactctaggttttgacatttcagttttgccactcttaggttttgacaaataatttccattccgcggcaaaagcaaaacaattttattttacttttaccactcttagctttcacaatgtatcacaaatgccactctagaaattctgtttatgccacagaatgtgaaaaaaaacactcacttatttgaagccaaggtgttcatggcatggaaatgtgacataaagtaacgttcgtgtataagaaaaaattgtactcctcgtaacaagagacggaaacatcatgagacaatcgcgtttggaaggctttgcatcacctttggatgatgcgcatgaatggagtcgtctgcttgctagccttcgcctaccgcccactgagtccgggcggcaactaccatcggcgaaccacccagatgacctctaccgatcgaccggacatgaatgcgctaccttcgtcggcgacgatggccgcgtacgctggcgacgtgcccccgcatgcatggcggcacatggcgagctaggaacctaggaccgtgcgtggccgccggctataaatatcccatggtcgtgagaccactagaaggaagcagcacctggcactgcgagagcgagcgtgcagtgagtagatagactagaccaacgacgacggcaggc

SEQ ID NO: 58 - DNA, 3064 bp, Zea mays
gctcgatccacctaggcttgttgcacatctttacccacaagtcatgttacccatctgccaaggggtcatgaatcccatacacctctaccatggaagcgagacagggtaacactacgaggcctttacaaagttccactagctttagaaaacccgctacaaggatcccccgtctgaccgccatcacagcaaaacccgagaacctccctacaccgaccactcccctactatccttgcccctttcgggtaagatagtcttccactagctttcctaattagtcagccaagggcgtcccataccacccttatggtagcactgtttttccgggtggtcgctccatgttccaattaacataataatcttatcatgaacaataaataacaaaaaatgataataaaagcatgatcatgaataatgtgtatctcaatacccaaaaccacataaagcaatagcaggtactacccaaaagttcagtggtaaacaaggtataaagatagtcaaactgggttgacctattgggtctcatcaaaattaacctatgcagatcataatgattaacagtaacattattgggtaaatagaagtgatcaagggcacaagttgccttcaacgagatcctgctcagcagtctccacctgctgaacacctgggtcctcagtggcttgcttgtctactcgcaacaatacaaacaaacatggtataggagaaattaacatcacaccaaacagcagaacagaatgcatgataatattctacgtgtcataacgagatggtaggaacaagaatcactaaattcagagttacgattttctgaagttattaggtgcttagtatagaataaatcaagtggataattttactctatgttttatggctaaacagagttaccaagtgataaacaatattaatacaaaattaatgcaactggaatggaccaaaaaggagttaaaatggattttctatgaattaatctaggttttggaattgtttttatactaaatattcattttctcggcttattattaaccctggtattttatttggactgcggacgcaaatgctagaaactacagggtccaatatatgaaaatcagggcatggatgtaattaatttacaatagcagtggacggcgggttaattcagtaattccctaggggcacttaagcaaatatccatcgcaaaggggtattgttggatcccgaccgttggatcagatccgaaggccgagaatagatcgcgcccacacaactgcgtcgtgcactgaccaccctccggttaagattcgacggaccaaatttaatgaaatccaaaccacccacagccccacgatcagcaatctacggtccctcttaacccagatgaatcggtatccgacttctaatctaagcagttcctcaatcgatcaacgctccagggccttcttctatctcccaacgcagatcgagctacggtcgcttgcacccgaggaacgccgacacagcgagcggcggaccagcggttctgggtaatgatttggagcacaaacaatattggcgcgacataggaatgatggcaactattaggttgtgaccttactagtgtcagcggtgtgggcagggtcgcccacgggaaaccagtgcgacggtgctcccggcttgttaatgacggtgtgctggtcccgacacggtgatgccccaaacgcccccgccgtacgagaacaccgcagacgcccctgctcgactccgccctcggcttcccgcgcccacctcgcacttcgacggccgcaccgaccctctgacctctccttttctctcctttctcactcctatcggtagctacaacagaagcgactcccaacgtggcgcaaaccctcgaagcatacggctggggaaggtggcagccaggtttatatcctaggcgcccgaggaaatcgtgtggacggctgttacgtttcgcccgcggggcgcgattcgcgcgaagaagactgtatgcgaggtagggcccactagcagtgagccatcacccagggaagcgcgcatgcatcgattgacacgcgaccccaacagtcaggcgacccgagtgtgcagacggtcgcgatggtgaaagtggctagctcgcgcggacgcgtaggggcattgggccgaaatgcgtttcagcggtccaacttctttttttcttgtctttttttctttccttttcctttctatttttagatttcaaatttaagttcaaattttttgtggtgaattttctaaaaatccacatatcagtatgaaaagaatttatatataaatctatttatttatatatttattttttttctatgttatttccaatttctaaaatgtaaattaggttaaatcgccatttggacactaatatatctttattagtattactattattatatgcacaaccaaataaactccaacatgatgcatcgattatttgtatgtcattggttaattattcactttaaatatgttccttaacgattctcatgaaacagaaggccatgcacataaagatgtatcccttttttctatattcccagagttgggtattacaacattcatctatgcattctaggatttcaattactctcaatcttttagtatttgttccttcattgtcaaatcacttctcatctaactactatgcttgtttaaccagcagaacaatactacaacaatatccatttataaaggctttaatagcaaactttacatattcatatcatgttaaggttgtcacatgtgtaaaggtgaagagatcatgcatgtcattccacataaatgaaaagaattcctatataaaaatgacatgttttgttgtaggtagtggaaattatctttccagcaaagaccatataatccgataaagctgataactaaatgtcaaaatcgagtaagtgccatatcatctatatcttatctgttgtttggaaaaagacaaaatccaaaaaaaaatatatgagatctcacatgtataaatagctcccaaatcagtagttaatacatctcccataatattttcagcattcaaaaacacaccaagcgaagcgcactagcaacgacctaacacca

SEQ ID NO: 59 - DNA, 178 bp, Zea mays
cacgtgagcttgcgatgtccactagggagctccatccactgatccacccccacgcggcgtggcgtcgtcattaacggcttgtggggaagggaacgagcaactaaccgataattagtaccagaccggccagtgaacgatgccaaaaccggcttataagctcagctgcgacaaccgtttt

SEQ ID NO: 60 - DNA, 330 bp, Oryza sativa
aagaacgaactaagccggacaaaaaaaaaaaggagcacatatacaaaccggttttattcatgaatggtcacgatggatgatggggctcagacttgagctacgaggccgcaggcgagagaagcctagtgtgctctctgcttgtttgggccgtaacggaggatacggccgacgagcgtgtactaccgcgcgggatgccgctgggcgctgcgggggccgttggatggggatcggtgggtcgcgggagcgttgaggggagacaggtttagtaccacctcgcctaccgaacaatgaagaacccaccttataaccccgcgcgctgccgcttgtgtt

SEQ ID NO: 61 - DNA, 246 bp, Oryza sativa
ggatcatgaaccaacggcctggctgtatttggtggttgtgtagggagatggggagaagaaaagcccgattctcttcgctgtgatgggctggatgcatgcgggggagcgggaggcccaagtacgtgcacggtgagcggcccacagggcgagtgtgagcgcgagaggcgggaggaacagtttagtaccacattgcccagctaactcgaacgcgaccaacttataaacccgcgcgctgtcgcttgtgtt

SEQ ID NO: 62 - DNA, 187 bp, Oryza sativa
tgggccgtaacggaggatacggccgacgagcgtgtactaccgcgcgggatgccgctgggcgctgcgggggccgttggatggggatcggtgggtcgcgggagcgttgaggggagacaggtttagtaccacctcgcctaccgaacaatgaagaacccaccttataaccccgcgcgctgccgcttgtgtt

SEQ ID NO: 63 - DNA, 163 bp, Oryza sativa
tgggctggatgcatgcgggggagcgggaggcccaagtacgtgcacggtgagcggcccacagggcgagtgtgagcgcgagaggcgggaggaacagtttagtaccacattgcccagctaactcgaacgcgaccaacttataaacccgcgcgctgtcgcttgtgtt

SEQ ID NO: 64 - DNA, 287 bp, Oryza sativa
ggtaccgagctcggatccactagtaacggccgccagtgtgctggaattgcccttggatcatgaaccaacggcctggctgtatttggtggttgtgtagggagatggggagaagaaaagcccgattctcttcgctgtgatgggctggatgcatgcgggggagcgggaggcccaagtacgtgcacggtgagcggcccacagggcgagtgtgagcgcgagaggcgggaggaacagtttagtaccacattgcccagctaactcgaacgcgaccaacttataaacccgcgcgc

SEQ ID NO: 65 - DNA, 400 bp, Triticum aestivum; identical to SEQ ID NO: 16

SEQ ID NO: 66 - DNA, 626 bp, Mirabilis mosaic virus
ttcgtccacagacatcaacatcttatcgtcctttgaagataagataataatgttgaagataagagtgggagccaccactaaaacattgctttgtcaaaagctaaaaaagatgatgcccgacagccacttgtgtgaagcatgtgaagccggtccctccactaagaaaattagtgaagcatcttccagtggtccctccactcacagctcaatcagtgagcaacaggacgaaggaaatgacgtaagccatgacgtctaatccccccaacttcgtccacagacatcaacatcttatcgtcctttgaagataagataataatgttgaagataagagtgggagccaccactaaaacattgctttgtcaaaagctaaaaaagatgatgcccgacagccacttgtgtgaagcatgtgaagccggtccctccactaagaaaattagtgaagcatcttccagtggtccctccactcacagctcaatcagtgagcaacaggacgaaggaaatgacgtaagccatgacgtctaatcccacaagaatttccttatataaggaacacaaatcagaaggaagagatcaatcgaaatcaaaatcggaatcgaaatcaaaatcggaatcgaaatctctcatct

SEQ ID NO: 67 - DNA, 357 bp, Cauliflower mosaic virus
tctggcgcgcctgagacttttcaacaaagggtaatatccggaaacctcctcggattccattgcccagctatctgtcacttcatcaaaaggacagtagaaaaggaaggtggcacctacaaatgccatcattgcgataaaggaaaggctatcgttcaagatgcctctgccgacagtggtcccaaagatggacccccacccacgaggagcatcgtggaaaaagaagacgttccaaccacgtcttcaaagcaagtggattgatgtgatatctccactgacgtaagggatgacgcacaatcccactatccttcgcaagacccttcctctatataaggaagttcatttcatttggagagaaca

SEQ ID NO: 68 - DNA, 510 bp, figwort mosaic virus
cagctggcttgtggggaccagacaaaaaaggaatggtgcagaattgttaggcgcacctaccaaaagcatctttgcctttattgcaaagataaagcagattcctctagtacaagtggggaacaaaataacgtggaaaagagctgtcctgacagcccactcactaatgcgtatgacgaacgcagtgacgaccacaaaacagctggcttgtggggaccagacaaaaaaggaatggtgcagaattgttaggcgcacctaccaaaagcatctttgcctttattgcaaagataaagcagattcctctagtacaagtggggaacaaaataacgtggaaaagagctgtcctgacagcccactcactaatgcgtatgacgaacgcagtgacgaccacaaaagaattccctctatataagaaggcattcattcccatttgaaggatcatcagatactgaaccaatatttctcactctaagaaattaagagctttgtattcttcaatgagaggctaagacc

SEQ ID NO: 69 - DNA, 554 bp, figwart mosaic virus
ctcgagcaagtgtacaaaaaagattaccacggaagaaattcacaaggtaaaactttttgagaaaagattgatcaacatcaatcaaatcaattgtggagaccacacaaagaaattgtggtgtaaaattctacagaaaaagtacgaagagcatctttgccagtactgcagtggggaccacccacgtgacaacaaagaagtggcagacaagtcacctcaaagtggaacccatccacgtgataaaagtatcatggcagacagccggtacaataatggggaggacagcttgcaaagcagcccatgtggaagcccactcacaaacgcgtattacgaacgcagtgacgacatccactcaagaattccatctatttaaagacggattcattcccatttgaagatcatcaatactcaaccaatatttctcactctaagaaataaagagctttgtattcttcaatgataggctaagaccctaaagagtctcgaaagagacatgtagtatagtaagagtcctcccagtccgggagattgtaataaagagatcttgttaaggatcc

SEQ ID NO: 70 - DNA, 299 bp, Agrobacterium; identical to SEQ ID NO: 17

SEQ ID NO: 71 - DNA, 711 bp, Agrobacterium
cctgctttaatgagatatgcgagacgcctatgatcgcatgatatttgctttcaattctgttgtgcacgttgtaaaaaacctgagcatgtgtagctcagatccttaccgccggtttcggttcattctaatgaatatatcacccgttactatcgtatttttatgaataatattctccgttcaatttactgattgtaccctactacttatatgtacaatattaaaatgaaaacaatatattgtgctgaataggtttatagcgacatctatgatagagcgccacaataacaaacaattgcgttttattattacaaatccaattttaaaaaaagcggcagaaccggtcaaacctaaaagactgattacataaatcttattcaaatttcaaaagtgccccaggggctagtatctacgacacaccgagcggcgaactaataacgctcactgaagggaactccggttccccgccggcgcgcatgggtgagattccttgaagttgagtattggccgtccgctctaccgaaagttacgggcaccattcaacccggtccagcacggcggccgggtaaccgacttgctgccccgagaattatgcagcatttttttggtgtatgtgggccccaaatgaagtgcaggtcaaaccttgacagtgacgacaaatcgttgggcgggtccagggcgaattttgcgacaacatgtcgaggctcagcagga

SEQ ID NO: 72 - DNA, 708 bp, Arabidopsis thaliana
atctcgtctctgttatgcttaagaagttcaatgtttcgtttcatgtaaaactttggtggtttgtgttttggggccttgtataatccctgatgaataagtgttctactatgtttccgttcctgttatctctttctttctaatgacaagtcgaacttcttctttatcatcgcttcgtttttattatctgtgcttcttttgtttaatacgcctgcaaagtgactcgactctgtttagtgcagttctgcgaaacttgtaaatagtccaattgttggcctctagtaatagatgtagcgaaagtgttgagctgttgggttctaaggatggcttgaacatgttaatcttttaggttctgagtatgatgaacattcgttgttgctaagaaatgcctgtaatgtcccacaaatgtagaaaatggttcgtacctttgtccaagcattgatatgtctgatgagaggaaactgcaagatactgagcttggtttaacgaaggagaggcagtttcttccttccaaagcatttcatttgacaatgccttgatcatcttaagtagagtttctgttgtggaaagtttgaaactttgaagaaacgactctcaagtaaattgatgatcacaagtgaaagtgtatgttacataagtggatatttcaccctttttccatcaatcaaaacatcatatagtaatccattggtttatacaaacatcaaaata

SEQ ID NO: 73 - DNA, 250 bp, Arabidopsis thaliana
agccattctctcgcagatgatgttcactttgtgttttacttcctttatgcattcacagcaataaaagaaagaaatctccatcgcttttggttttcttctctgtcttaagttagtcgttttcgtgtctaatctattacttatcattgtaatagactcttcttctattgagatttgaatataaactaaaacacattccattttactgtgttctcaacattcagaatgcaaacggactaaccgtagtgactcg

SEQ ID NO: 74 - DNA, 480 bp, Nicotiana tobacum
aaagcagaatgctgagctaaaagaaaggctttttccattttcgagagacaatgagaaaagaagaagaagaagaagaagaagaagaagaagaaaagagtaaataataaagccccacaggaggcgaagttcttgtagctccatgttatctaagttattgatattgtttgccctatattttatttctgtcattgtgtatgttttgttcagtttcgatctccttgcaaaatgcagagattatgagatgaataaactaagttatattattatacgtgttaatattctcctcctctctctagctagccttttgttttctctttttcttatttgattttctttaaatcaatccattttaggagagggccagggagtgatccagcaaaacatgaagattagaagaaacttccctcttttttttcctgaaaacaatttaacgtcgagatttatctctttttgtaatggaatcatttctacagttatgac

SEQ ID NO: 75 - DNA, 250 bp, Arabidopsis thaliana
atatgaagatgaagatgaaatatttggtgtgtcaaataaaaagcttgtgtgcttaagtttgtgtttttttcttggcttgttgtgttatgaatttgtggctttttctaatattaaatgaatgtaagatcacattataatgaataaacaaatgtttctataatccattgtgaatgttttgttggatctcttctgcagcatataactactgtatgtgctatggtatggactatggaatatgattaaagataag

SEQ ID NO: 76 - DNA, 1000 bp, Glycine max
gctggagctgatttctgtgtgatgttcgatgttggattttcccaaacattttaagaagaaatgtgatgtgtaatgggtctgtaatgacctttgaaaataagtttggtttgtgttgaactctattgtcccattaatgttactactgtttgttatcaatttgtggagctgatatataattatcaactgtatgctggcatattgtgtttgaattttgttctcaatccagtgaattggcgtatattagtgggttttttattcttcatgcttatcacggaggaaaagcagggatgagttgtgtgaaggatggtgatcatcccacgaattattagattttggtattataggttaaagatatttattaggtagggagaactcttggattagattctaaagtgatattttgaaaacacaccaaaggatttttgaacaaacggagatcatgatccctagtttcaattagctgccccttaccaagaggtagcaacttaaaaattatgctcgtgaagcatatttggtatcgtatataaattatgtaagcaatctgcttcagttggaacattaattggcttgcggaatgcacatttagatgatccacacaggtccacataaaaattcctaatcaattttagttatgcaatctttctgcttcaggtagtccttgtcttacagaaagcacattgagatgatccccacacagatccacataaaaaattcctaatcaataataacttgaaaatcattaaaagatgtaatgccatactaatccctaatttttgtgcaagtttttgtatactggaccccaaaaaataccaaaaagaaaaaacaagttattcagtgatatttttctgctccaatataaatttgattaccaaataccaaaaaataaaaacactattcagtggtatttttctgctccaatactggaccccaaattaatcagaatcggatccgtttaacagataaaaacaaaagcgatcgggttaaaatcccatttttacaa

SEQ ID NO: 77 - DNA, 1000 bp, Solanum lycopersicum
gttgtggttgtctggttgcgtctgttgcccgttgtctgttgcccattgtggtggttgtgtttgtatgatggtcgttaaggatcatcaatgtgttttcgctttttgttccattctgtttctcatttgtgaataataatggtatctttatgaatatgcagtttgtggtttcttttctgattgcagttctgagcattttgtttttgcttccgtttactataccacttacagtttgcactaatttagttgatatgcgagccatctgatgtttgatgattcaaatggcgtttatgtaactcgtacccgagtggatggagaagtgctccattgccggtttgtttcatgggtggcggagggcaactcctgggaaggaacaaaagaaaaaccgtgatacgagttcatgggtgagtgctccagcttgatcccttctctgtcgatcaaatttgaatttttggatcacggcaggctcacaagataatccaaagtaaaacataatgaatagtacttctcaatgatcacttatttttagcaaatcagcaattgtgcatgtcaaatgatttcggtgtaagagaaagagttgatgaatcaaaatatctgtagctggatcaagaatctgaggcagttgtatgtatcaatgatctttccgctacaatgatgttagctatccgagtcaaattgttgtagaattgcatacttcggcatcacattctggatgacataataaataggaagtcttcagatccctaaaaaattgagagctaataacattagtcctagatgtaactgggtgacaaccaagaaagagacatgcaaatactacttttgtttgaaggagcatccctggtttgacatattttttctgaatatcaaactttgaaactctacctagtctaatgtctaacgacagatcttactggtttaactgcagtgatatctactatcttttggaatgttttctccttcagttatacatcaagttccaagatgcaggtgtgcttgattg

SEQ ID NO: 78 - DNA, 1000 bp, Pyrus communis
gtgctggatgtggccggtggccgtcttctacccgttttcgttgaattgtttatgtttttactgtttttatgtatttaagtttgatggtactgtttctgcctcctgattgaggcatatggacaagtttggtttatcttttactatgttttgataaataaattccgttctggttaaaaacttcgtgtttgaaatttgttgtgaatctcttggtttaatttgtttgtttgcatggtgttgtgtttgtgaatggtttgctttcaatcgtctgtttaatgttgattgtgtggtgcggttgccatccttgaactggacctttggtacaagactggcatttcaaggtgtgcctcaatctgtggtttcgattgtggtttcagattttccggtgagctcactctagcgtccggcatttaccccaatcagttttccggcacggagagggaaattgatatttaccccaatcagttttccggcaacggagagggaaattgatatatcggagtgaaggtgtccgactcaactatggcaagcgtcactctagcatccaacatttagccgaaaacctaagactttgacacccaaaagaagagatgctgttgagtctattgaaaacacgagttacaccagttgtgtggaaagaggagacgtgccgtgtccaatgtatgctaatttgcccctcatatctgcagccactataggctgccgatgaatttcaccgtcccctgatgtatattttcagtacttgtccacgtttgaatattgacatccacgtttgaatttcgctatcctggtgcatccgctcccgactctcttagtcgagttggaaaaacccaaataagttaactggctttggaccttctgtaaacgtctatccatttagggctaaccgcgtggttttgttacaaaatcgctttagacctcccgtttatatctcggaaaccatttttagcgattgaattttatcttttgtacgaaagtattggacatactaatccgaagttag

SEQ ID NO: 79 - DNA, 1000 bp, Beta vulgaris
gcttgtggtggttcgtcgttggttgttggccttggaacaatggctttgttgggtgtttatccccctataatctgtgaattcatctatcatctagtttatgttgaacaattttaatttcagttggttatcaaatgttggttttatatcgtcgtatgtctgttgggttactatgaactattaaggttcagttgtgaataatattctctgtttgtgtctactttgttctccttttgttgcaactatgtttttaatgtttcactttatcttcctgatttctaagtggcattatcatgcttcatgccttgccttgtggagttgtggagtatgtttgattatattctccagaatgatattgctcagcttattgttacctaactttttgtctggctttttatgcttgttgattgtagataaagggaacaaaatttgtgttcacatagtatgcacacattttgtgtttgcagattgtgtgccatttatcttgctacactcttgtttatggttttttttggttgtatactctgttctcatttgtggtttcacctaaaacaaatgtgatgattttggcaagggggtgcatctctgtttttctggttgtttttttttttttgatgaccttgagtgatggtggtgttgatgtatgcgaggagtcgaggactgatgcttttgcacatatgttgtgtctattgttctggcttgtatgcactgttacggtatgtcttgtgagctattttgaagtatatttgtaattgaacattgatctgagagttcgggctggtgcatcttccattactaccaatgttacagcattgtaggagttccgttagtgtgttgctgatcccttttgatatctttgaaatgtgattcataacataaatgccgatggggaaggaaagatatttactgttgaatctaaatgtgaagagatgctatgagcctaatccattttgggtaagcctcacctttgctcataagctttatgagtcccactgctgaaaat

SEQ ID NO: 80 - DNA, 1000 bp, Raphanus raphanistrum
gtctctcgtcctttgtcttatcaaaaatcaacaatgtctgctttttagtctcgttttctttaaaacttatcatggtttgtgtgtttgaggcattataagcctcttttgaataatcgttgaactctgtttctctcttttccttgcaagacttttctatctatatcctcgttattcttaaatgctttgtgttcatctttcaaattttgaggttaagttgtcgatgcggtgaactttctatttttgcttagctgttacttctgaaagcacacctgtaagctttaacgtgttcacttttcagagttatgtgaagttttttagaacgttcagtctgtacttattggtcgtctctacaaggaatcgtgtgacaaaattgtctgttaccactagcttgacaagtatagtaatttggagaattcatccttccaaaagaggttatcagtgatgggttagtctcttggtcttcatacgcaaaattgaatctggtgaacaacagaggttagtcgagtttgcaagttaattggccggatcataggtcgagtttgcagatcaatgggccagatcataggtcgtaattgactgttttatatcgctggatcacttcagtaagaaagaactaccaaagagttcagtgaggtcttaattgacagatatgtgaactaaaattaattcagttgctcaaataatgtttaactgcatcaaacgttttagtggtgctcgttttattgatctaaatttaaatttgtaaagagttttaaacatggtgatttatttggaaacacttttgaatgcattataaagtgtaaactaggtgttttgccggcattttcagatttaatagtttctagaaaaattataaaaaggtatattataaaattcaaaaatcttaggataaaatattggcccatttgggtgaaaaaccaagaacgataagtttattaggcatgtatgcaacacataatttaattaggtagtcgtgcagaactctagaatcgaatttact

SEQ ID NO: 81 - DNA, 1000 bp, Ipomoea nil
agagcctcactgtcctgtttgaattgcttggtttgtgtgttaagtgccaaagctatagtaacttggcactgctggtgaattgtgtttgttttgcttttggttgatgaacccatgaaggttatgtttccttgaataataataataataataatagcattactattattattattaggtcctactattttgttagccccatttgttctgaactctgtttacttttagtttaatgttattaatatattttaccaggtaaaatgtaatactattttatagaatactttcgttaaaaatgagtgttaccttcatatctatctcaagtagtaatcaatttgagatccgtctactgggagcaacatagcattggccttcacgagaaggaagggacattattgctccaaccgtggcaggagacatttttataaataataatctgaactttataaataatttgaacttacgtgcagcaacatagctaacaataaagactacatctctaggctctagccaacaataagtgctttgatgtaatttgattataattgtattgcaatttgtttagtcaacaataagtgcctttttggttggatgtaatttaaatgtaattacattgcaattcacttttcccatcaattacgttattcaattgaatataattcatggaccttatttaagaattacaattcagtggtgaaatggagaaatatattattgtgaagacatttttaccattatcattacttatctcatgtcgcccaccgaattacaatttattctccctaattcctttcttccaactaaaccggtaaagacttcatctcatactatgtgaaactacaaagaaaggtttactttttacaaggcgtttaagttggaagaagagaattaagaaaaaacgagtagtaattttgttggaaaggaatttaaattatattgtttgataggaaaaaatataataattcttaaattacattgtttgatagggaagaataaaatgatt

SEQ ID NO: 82 - DNA, 1000 bp, Cucurbita sp.
attgttcttctgaagatggataaatcagcatgcggggtggggtggccttgttgcggccatttgttattttcttctgttctctacttctggtgttatgtttttaaatgctccctgagggttacagtatggggagaatattaatataagatgtcatatttcaaataaaaatttcgtttcttgtttaagaatcgtgtccagacttctcttatccagattctcctggttgtttgtcattggggatgatgatgactaaacatggttgaagctttgtcctttctggataattcttaattcatgatgggacgaacacaatcccctggtcgtccagagaattgaatagctaaggaactctttagtggagtcgaatcagatctgaatcagatatggctgccctctccttttcccccaagaacccgaaatctagttcatctcccccaggtccatccccgttccctgtgcctatctccaaaagtcctccagtcttggctacagcttaaattatcatcagtgctagccattttgatcatatctgcaaaaagttgatttcggcggccatgagtgcatctgttaaaacaagaatgtgtattggggaaactcacttcatctccatcttgggaaagtgggaagatttatggggtttctaggatacctaacttagaagacataattgaagacaacatattattagtttaacggtgaattggaaaggctttcatatttcttgtgagaggctttcatatttcttgtgagatcccattttagtcaactctctctaaccaatacaacttctccttaaccaattcattttaaaatgtgagaccgacgacaataactgttcaagcagcagcaatggtggtatgcaggtaggaaggaactctattatctttgactctgagtttcaactattaagtgctttatctgctactcaatcacggaatcgattctgtctaagtggaaagaaaaagaagaggaagttagtgagcccacaccctccttttat

SEQ ID NO: 83 - DNA, 1006 bp, Helianthus annus
atgtttgtggtggttgtgatgtttgaagttggtactgttgttggtttttaaatgtctgtggttgtggttaatgtttgaagttggaacaattgttggatacagattctctatggtttccttctatgattgttgaataaatgaattttatggtttaatcttgggtttgatcatggtcattgttataaattgaagtctgggttgcatattctgaaaatgatttgtcagtagtttattgtttggtttaaatgttgattataacgaaggtagtttatgatatgcttagcaactgttttgtaaggacatagtgatttgtgccaagaccaaaagttcaaagtggtaggggtggcgtgaaaaaaaaaaaccaattttaaagggctagtgctcttgaccaataaggttttgtcatgtcatgtgggttgtctcgctcaacgtctaggctgaaaccccgcccaaggagtcacgctgaaacccaagcccaccataccactttgaaattcccttttggtcttagctagcaaatataccatgtccttacaaaacagttgctaagtcgttttggcatgtgtttctgtgtctgaagatatgttaattgcatatttcataatcatttaagcatagaaacgacggaatttaataaacacagatcaaattatttggtatttttggataaagtcctttttgagtctttgtggtgtgtgcattttaactatttttgaatctaaaaatcaaacttgtcttgatttgagtccctgtagtttgtatttttaacactttgattccccgtggtttgtatttttaaccttttgaatcaaacacttttagtccatgatttggatgaggtttgcgttttggattcaaagggttaaaaatacaaacctacaaggactcaaatcaagtcaagtttagtttttggattcaaatagttaaaatgcacaaaccacaaggactcaaaaaggactttactcttttggatataacaaagagtttcttaaattcctctgagctc

SEQ ID NO: 84 - DNA, 306 bp, Pisum sativum
gttcgagtattatggcattgggaaaactgtttttcttgtaccatttgttgtgcttgtaatttactgtgttttttattcggttttcgctatcgaactgtgaaatggaaatggatggagaagagttaatgaatgatatggtccttttgttcattctcaaattaatattatttgttttttctcttatttgttgtgtgttgaatttgaaattataagagatatgcaaacattttgttttgagtaaaaatgtgtcaaatcgtggcctctaatgaccgaagttaatatgaggagtaaaacacttgtagttgt

SEQ ID NO: 85 - DNA, 469 bp, Pisum sativum
caggcctcccagctttcgtccgtatcatcggtttcgacaacgttcgtcaagttcaatgcatcagtttcattgcccacacaccagaatcctactaagtttgagtattatggcattggaaaagctgttttcttctatcatttgttctgcttgtaatttactgtgttctttcagtttttgttttcggacatcaaaatgcaaatggatggataagagttaataaatgatatggtccttttgttcattctcaaattattattatctgttgtttttactttaatgggttgaatttaagtaagaaaggaactaacagtgtgatattaaggtgcaatgttagacatataaaacagtctttcacctctctttggttatgtcttgaattggtttgtttcttcacttatctgtgtaatcaagtttactatgagtctatgatcaagtaattatgcaatcaagttaagtacagtataggctt

SEQ ID NO: 86 - DNA, 1000 bp, Helianthus annus
aggatttaagcttgtcttatgtttgaactcttgtgaaaggtttctgtgacgctactttttaagtgttggtgcaaatttaaataaaatcatggttctataaatacgatgtttgtatgtaagtttgaacacccaagttcattcaggtttcaacagatgtgcttatttaagtacacattggccacgtcatcaagttctcgtgtttgtgttgctttgatctttagttgttcattgcacgtactttggttattgagttgtacaattacaagtacggttacaaaaatctttttagatacacatcaggatgattatcacaagacaaatataacaatactgatgttgattgagcaaaatataaaaaaaaaagccatcatactaaggggctgtttggctaagcttattttagtgacttatttacttatttactttttaaaaagttaaaaaaggtgtttggattagcttattatgtgagaggaataagtaaataagtcattccaataagcttagtcactttttagatacacatcaggatgattatcacaagacaaatataacaataccgatgttgattgagcaaaataatataaaaaaagccaccatacaaaagctaagttttagtcgtgttactagccaaatttatataaatgtgtaacatactctttaagatccatataaagttgaactcaaaccactttattttccctcagccaccatatgactagaagacattccagacgacccctttgaagacatttaggctaggatcttcaaccttactatattagaggccgcagacaattgcgatttttatacaaacgtcattattatatgctaaacgtataaacaaccaaaaatttctcaaaatgggcattatgtcaaatctatagctcacacaatctttcctcacttaagtgtcagagcacaacacaagaggctctcacggtatctcctgcttgtgtagtgtggttaacgagttgtacatctatctcaacgacactttgaa

SEQ ID NO: 87 - DNA, 999 bp, Zea mays
ccaccggtatctcgcttccatttcacaccccacggcctagctataaagactaatggttccaggtgtctgaagtactgaagacaggggggctagctatctaatgtttgtgccgcacgcatgagctgtaaggaggccatgcttaattattctgttgccgttgctactctatctatatgcgcctatgcctccgtgcatgaactatgctttaggtggttgctgctccacactgtggtggtgtgcttttgcttttgtgtggtcgtattgtatgcgtaacctgacagatggatccctgattgctacatgtttgaataatttgcatgatctagctagtttctgcctaatctaatggtacggctcatgtcttgtcaggtggatttgttatgtgttttttttttcaaattgaggcttgtttgttttgctctcaatccatccatgtgaattgggtggaattaaatgagtttaaattccaaagtcagtcaaaatctgttataattcttccaatccataaccgaagatcataggccctgtttggaatccctagaactaatagttagctagctaatatattattagtcggtatgagccggctctaataaactaattgttatttgtgagataactaacaattactaatagttagctagctaatatattattagctggtttgagccagctctaatacactaattgttatttgtgagataactaacaattaattatgatattagctgatgatgtttggaacctaacaactaatttttaattttatttctataggttctaaacaggaccttagtggctagtttggatacactaaagtgtcgttcggttgtttgagatcgatggatcgaaacgattactaatcagattacttctctaatttatataaactttgattagctaaaataatttcgggcgcaatctggtacaaacgaacaagccctaatcaggatggcatgccaatttggattggtgtggggtcacgcatggtgaattatg

SEQ ID NO: 88 - DNA, 1007 bp, Oryza sativa
ttcttcggacccaagaatgctaagccaagaggagctgttatcgccgtcctcctgcttgtttctctctttttgttgctgtttcttcattagcgtggacaaagttttcaaccggcctatctgttatcattttcttctattcaaagactgtaatacctattgctacctgtggttctcacttgtgattttggacacatatgttcggtttattcaaatttaatcagatgcctgatgagggtaccagaaaaaatacgtgttctggttgtttttgagttgcgattattctatgaaatgaataacatcgaagttatcatcccagtattttcgcatgaatgttcttttcttctgtcttgtgcatcagtgatctagtgcatgggagtttgtattgtgatgttcgacatcacgtaacttccactttgcctttgctgttcgatattttaatgacatgtcacacacacttctgatacttttctttcttggctattgtgccagcatgatgcaagatgcatcacagcatcagatatattctcatcgtcaggctttagcagcacacgagcacgctttgccgcttaaaagttgtacggcgcagcttagacatcccctgtagaagtgataatcttttcacttttccttaaacaaattgagaggggaaatggaaccatgtggatcagagaagcttttgtttctttacacaagaatatttggtacagtgggggtcctatgttcgtgggttcgtggcttggctgcctgtcttcaaccaagtgttttcagttcaacatgttagcgtgtagaaagagcacaattctgtttatctccaaggtaaaatgtggcattctgttaaagaacatgatcctgccaattttttaagtttcaatggaagaggaatgtaaagctttctatggtttgtgtacacaacacagtggaagaggagtgcaagctttctatggtttgtgtgcgcgttgtgtgtcagcacttcaattttgttagaaaatgaaagaaaaaaaaggatg

SEQ ID NO: 89 - DNA, 1000 bp, Oryza sativa
tcagccagtttggtggagctgccgatgtgcctggtcgtcccgagcctctgttcgtcaagtatttgtggtgctgatgtctacttgtgtctggtttaatggaccatcgagtccgtatgatatgttagttttatgaaacagtttcctgtgggacagcagtatgctttatgaataagttggatttgaacctaaatatgtgctcaatttgctcatttgcatctcattcctgttgatgttttatctgagttgcaagtttgaaaatgctgcatattcttattaaatcgtcatttacttttatcttaatgagctttgcaatggcctatgggatataaaagattattctggagggaagtgatgctggaaggactatgctgtcctgatttatatttggagccactatgagcatttgggctttcttttcagaacgctgtaggcgtgtgttgaaatctttgcgacattcaatttgatatatgattcgaggtaattgggctttaatttgtcatctcatgtaacatctttttgtttcttcgctgcttgatttctctatttcgtagcattggaagataatagtagaatgatgatatactccaatacttgcaatttcaaaaccgttagaaagaaaggaaaatcacggctaggggaaaaattctctctgatgcgtgcatcaccaaaatctgattgattgacataagcattggaacacaaatagaagatggagaggtggacatgtttccgagacatagcatttgagctcacattgtttttgatccgtggctgtgccatacgcgataatttactaaactttcccttgccccttggtaatataaagcttataatgtatacaccgaaattgaaaaacgtattagttcactcttcttcctttttctcagcaaagcgtgttcatcaattttattccacatgaatgtgattgcgaattgtgaccaggaatgcatgatttaacaatcccgatcaaccctgttgtcggtggtggcactaaaaatta

SEQ ID NO: 90 - DNA, 1000 bp, Oryza sativa
gtcctcagccatggagctgctgctgttctagggttcacaagtctgcctatttgtcttccccaatggagctatggttgtctggtctggtccttggtcgtgtcccgtttcattgtgtactatttacctgtaatgtgtatccttaagtctggtttgatggtgtctgaaacgttttgctgtggtagagcagcatggaagaactataatgaataagtgatccctaatcattgtgtccaaattttgcttctgctatacccttttgtgctgtttcttatgttttgcttaaaaatttgatctgacaaacaaatttgtctaaattatgctcttgttctgactgtgtactgtacacatttgtattgctaccggtttggcacatagttttctctttgattgcagatcaaacccttctgattgcagattgcttggctatggctgatgtgctcactgttcttctttagcttgtatattgctgatggtggcttggctacggctgaaaaagttgctgctgcgccgacttggcaactgttgctccagtaatgctttgtcctctcttcctagccgccgacttggcacttggcagctgttgctcctgtaatgcgttgttatctcttatctcttgagatgtactatgattttgaggctgtttgacttgtgccagattgccagtgctgatgctatattatctcaggtttttatgctagtatatgttttactgtgtgctgcctgtgtcgagttacgtaatctattgaaccgctatgcgtgttgatgccctgttgttgcttgccagattgatgcccctgttgcttgcagcttgcaagctgtagtgaaatcctaaaattcgaagccaaatctattctgaacttttgaagatctgtgatgtccggaagaaaagattcaaacagataaacgggactctccagaatctataaaataaatgatcgacaaacgctttgctttggtaggcttctcattaacccaaacattctggaagaccaatgctgga

SEQ ID NO: 91 - DNA, 1000 bp, Aegilops tauschii
gtgcctggcaatggagcggcttctctgcgggttcacaggtcttgtgtcttcgatatgtcctccaatggtgcatgtgtctgtcgtcctggtcgtttctatgtttctatcgtagtgtgctgcatcgttatgttcggttgtatttgagaactgctgctgttgtgaacagctttggtgaacttgataaataagtgagcccctaattgtgtctgcagctgctgagttatcctgcgttttcttttgtttgcttctatctgatgcatttcatctctattcatatgaatattgtaccttgcatttgttagttcgactatatggtactttgtggcaattacatcttggttatcatagaggcttcactcttttgaggagtagggattgggagggaccggactatcattagagataaccgtatcctgtttgtcgacaagcagcatggtcgggcactccggtgggatcatggttgaatcggactgcattgatgtcgtcgaggtgatgcagcaaggggttaaatctgtgggcgatctttgaggaatgtagtttcttatgccgtaaattttgatcatgtcttgttcaaccatgtcctgtgaattgaagatgaatccttagttgtcaatcaaaaggataagaaaaacgatgttccatatgtaataatttgttcataaccaagtaaaagtatctgtgtaactagtagaaaattcagtagatcagaacaacatatggtaccaacccattttgtacatcaaggttgattgaaaaacattttaaggaaaatctgttgtgattctggtgcgccaactacaaaattatgtgtgtgccttatattataaggtgagaggcatttcggcaatgcaaattgtgtggaccttcatatatgtattgactttttttttgcgatgagtattgactggtttattaagtgcatgaatccctaactttcaccatatgcacaaaacttctgagggttatgtgggcattatgccagccagaccgaatcaaatgc

SEQ ID NO: 92 - DNA, 1000 bp, Panicum hallii
gtcttgggccatggagctgctgttgtccctgggctcacaagtctggtgcctgccttgtctctccaatggagattgtcttggtgtcctgtggtcgtgtccttgtcgtgcctgtctgatgtgagtcatgtcgtctggttgtgttttgtgaacacttgctgctgtgcagcagtttggttgaactatgcaatgaataagtgagccctgaagttactgtggtaatcttgtcttctggatgagtcgtcattattatatggtttattcatgtttgtgaagtggaagcattaatttcctcctggtgcgttgcttttgcagttctgcttgtgtcgtgatgttactggttttgcaagtatgctgcttccttgatcgcaacttcattttgggtcattcttcatttggttatgctggtgctctggttttagattcatcatatatttcagattaatgtagtgtttataggaactatcattttaaattttcccagatgtcatttgtgctgcctggttgttgcatacggcgtggttgtcaaggcaggttaagattgccgatctccttttgatccttgctatctccagattatttggaagattttttttgtttcttgaacaggtagattggttgcagctatgaattcattgaagctatggtgcccaaaatgtcatgtgctccaaattttgtagccattttgcagatgtagcaacacgttttcagattatatagtactgcatcaaaatcaaattgttggcgccatagtacattactatcacactagtaatgaccaggaacaatcgcagccagttaacatgccggagtattccacatggataaacaatggtgcatttcttgaggagttgatcagaaccactgaactgccaaacatgtccgcagaaccatgacaaccccttgcatgaagatgtgctaaagttgttgacagaaagtccaaactctatgatatgcacacattatcagcaagagatggggattgttatttgccaaaaatttc

SEQ ID NO: 93 - DNA, 1001 bp, Zea mays
ccgtcatcgtccatcaacgaccaagcaacaacacatccacactatatactcaattcacattgcaatgcatcgttattattacatcatttatttcagaccccccgcccactgctaaccgtagtccataagagattcatcatccgtggactatgctcgatctcttccgtacgatacaattctcaaatatttctatttatttcctaagtgaattattatatatgtactatttcattccaggttcattttacttgtgaccattcttcagttcttttttctgtaaggatcggtatatcggagcatatgtgcatggctatgccagttgttgggcgtaagaatgtatttttttctgtaatatagaaaaaaactattttaagcaacaggttattgtcaagttactttgcttgtgaacaaatttcgtaccacgtatatatttgtatgacctttgtataaaggtgacacgcctagtaacattaaccaaacaccgaggaaatattaattctcaatccaagggaactcaaggcggttgagaggatttttagggctgattcagtgatcagagatcccgtggatcccctcaggatccctgatcaccaaatcaacccttaggctagtttggaaactcaaatctcttttaggattgaagaagattggagagaaaattagttcatttccacctcaatctcatttaatcccgaaggggatttgaggttcccaaagtagcccttactgggataaaattccccttaatctttttcaaggctactttgatgacaatggaatttagggagaaaatgaactaattcttcacacgatctcctccaatcctttttaattctcttatatcaccaaacaaggcctcaatgtccttggattggcgaggtcatcccattttatctcgttcacaaaaacaacagcgacattaatagacttaaaaacatttgagatgtccacggagatatgaccaaccggaaacaagtgatattcatggtagctgtccctac

SEQ ID NO: 94 - DNA, 1000 bp, Zea mays
tctatctgtctggtgctgtgcttgcttgttggttacctcgtggaagcttaaaatatctcgtcttgttgacatccttgcagttgtcgcgtgaacaagtaatctatgatggcaatgtttgcctggtcatgaagtattattactttcgttgaaaccgtgatgctattaagacttaatttttttatggaacatcgaatgtaaggcatacatggttatgagttttgtactaccctttgcagtgtgttcctgtttaccttttgtgctgatgattcgcttgtctttgtgtcttcaagttaatcttgcacttaactgtttttaatatgccagatcgtttcaaaagatttgaaatttggattcttccgaaacgtttttttgataataatgtagtcctgaaaacatgattttgattcttcagaaactatttttgataaataatgtagtcctgacaacatggtcaattttacgcttttagttatcaatgcatttttcatgatttccgaaagttccgctccaaccttttcgaaatgccagcatttgagttgtttttttttctactttttccgatagcctgaagtctaatttagttgcaaaaacataaatgtggagtaactagagctgtgtctaaggggtaagtgtaaaaattgccaagagccctttttgaagaaggaatgtttcatgctctacgatggaggcgaaggaacatctctacgttgatcagatagcggtcgtctcctccagattcgctgtgcttcgaagatccgcgatcgattcctgctccactcaaggtcacctccactcgagttctcaagcctatcctcttcctctccctgtctctcacctttcctcttccctgcaagatggatctgccggcggtggctgccatggtgaggtcatctccctcatacgaccgtggctgctacaacacaagctcgggtgctccgtcgcctaaggagatcccgctgccaggcgcccgcccgccattcatccatggtggttcggccgc

SEQ ID NO: 95 - DNA, 1107 bp, Zea mays
tcgtcatcgtcctactatcaagcaacacgatcgaccaccacctcgattatatatgcatcattatagtatcgtttattaatttcagacccacccactgctaaccacatcgtccacgagagattatattcatccgtggactacgctctcgatcttacaatttgaaacctttctattttcctaattactatgtattccaggttcattttgattgtgaccattcttcagttctttctgtaaggatcggagcatattatatactctatgtggctatgccaattatattgttgggtataagaatgcattttgtttctgtaatacggaaaaatatattttctttaagcaacaacaaggtaaaaacttgcctcgttgcatattttctttatgtcaatctccttttgttcgttgtatgatcctctgtttggaaactgaatactgatcgaacaactgatcaggagttaaaacatattgtaaatatatataaaaacttgctgtgtacaactcttctttattgtataagtttcttgaggtaaccgaaatagatagtaaatcccaatacaaatagattcctccgttactaactaatctgaacataaatgctaataaaaaaagtataaatttctatctgcgtatgtaccttgaccttacctttattctattaactcctgattttctattcagattttgaacggtctgttacttcctttctattctgttctggtttcgtcgtcgtttgtttccgaacggtctgctacttctgattttctatttgttcttacgtttggttttgccgttctagtttcttgcgtttttccatataaatatagaaacacaaaataaatgtaatgttgtagatacttgaactatcgatcttttcctttaaaaaatgatattgctaccactaatgtagttttaattaggaacaaaacttacaaccaatgatcaactaatgaaccggtctagaacagtctatatggacatggtgagcaagcgtacgtaattccgggaagcacttgtcgtccggacgcaggctacattactacatagtagcaaaacaaattttattccgataatattggttgctatacagacctctgcagacaaaaataa

SEQ ID NO: 96 - DNA, 1000 bp, Zea mays
gtcatgggtcgtttaagctgccgatgtgcctgcgtcgtctggtgccctctctccatatggaggttgtcaaagtatctgctgttcgtgtcatgagtcgtgtcagtgttggtttaataatggaccggttgtgttgtgtgtgcgtactacccagaactatgacaaatcatgaataagtttgatgtttgaaattaaagcctgtgctcattatgttctgtctttcagttgtctcctaatatttgcctgcaggtactggctatctaccgtttcttacttaggaggtgtttgaatgcactaaaactaatagttagtggctaaaattagttaaaacatccaaacaccatagctaatagttgaactattagctatttttggaaaattagttaatagtgaggtagttatttgttagctagctaattcaactaacaatttttagccaactaacaattagtttcagtgcattcaaacacccccttaatgttaacgtggttctatctaccgtctcctaatatatggttgattgttcggtttgttgctatgctattgggttctgattgctgctagttcttgctgaatccagaagttctcgtagtatagctcagattcatattatttatttgagtgataagtgatccaggttattactatgttagctaggttttttttacaaggataaattatctgtgatcataattcttatgaaagctttatgtttcctggaggcagtggcatgcaatgcatgacagcaacttgatcacaccagctgaggtagatacggtaacaaggttcttaaatctgttcaccaaatcattggagaacacacatacacattcttgccagtcttggttagagaaatttcatgacaaaatgccaaagctgtcttgactcttcacttttggccatgagtcgtgacttagtttggtttaatggaccggttctcctagcttgttctactcaaaactgttgttgatgcgaataagttgtgatggttgatctctggatt

SEQ ID NO: 97 - DNA, 1000 bp, Hordeum vulgare
ccgcctagccgatcgagggctccaggcacgcatgcatgttcctgttatgtggatgttggaataaaatgctggtgatctatggcggctagcttgcttcctggctagcagctgctgtaatgaaatttgtgttgcaactttttttttagtcccatccagagctcttttcttttctttaatttgctgtagtaatcaaagtaaggtaggtcgccagaaaaattgagttgggccagttaattatgggggaatcgatttgatccgttggatgacacatcttcttcctctagtcggcttcctcctttaaacatatcagtatcacatcgcctgctaccgcctctcacggccgcctcaccgcaccgcccttccctgaacctcccccaccgccgatcttggtgccgccccatacaatccctctaagtccttcgaccacccaaaaaaactccggcgagagggctccaggcatgcatgcatgcatgttcctgttatgtggttccaccgatgatgtgggaataaaatgatggtgatctagctacaggcggtcaggttgcttctttcctggctgctgctagtaatactttttagagcctcttttcttttcttttgctactagtaatgaaactaagttaagtcaccaggaaatttgaattgggccagtcaattccgggggaatcgatttgagccggtggatgacaaacgaacggtgatgctcgcgtcttcctctggtcgatttcctcctggtattctagacgtggtctggccgattcaccgattccaaatatcactttcacatactgaaagaagcaacttcacgaattgtaaatcagcttcactcactggaaatatgagttacacttctttgaaaaaacggtttcacatttttgaaataatcgtttcaaatatttgaagaaaatcaattttacgtattaaaatatatgcttcacaaagagaaacaatccctttcacatatttgaaaagagaactgcgttccacaaactgaaaatat

SEQ ID NO: 98 - DNA, 1042 bp, Zea mays
attacatatgagatgtactcgacaatggtgccctcataccgacatgtgtttcctagaaataatcaatatattgattgagatttatctcgatatatttctgaactatgttcatcatataaataattgaaaacatcaaatcataattttaaactcatgcttggtcaatacatagataatacaatattacttcatcatcccaatgatgtcctagcccaacctattgaatgttaatgtttggttgtgtgagggtgtgtttataacatagatgtgattatttgcgctttttgttgagtatatacatatatggtatgttgatttgatatagggatggacacatgctttggccttggatattcaaatcacttgtacttgcacgaagcaaaacataatatatagtttagaagtaaacttgtaactatgtccaaacatgctcacacaaagtcataccgcattataattttttggtaaatattcaacacatgtattttttacaagaacccaaattttacagacaaatgcagcattgtagacatgtagaattctttgaagcatgtgaacttaacaacaccaatgtcattaaatcaactagaccctatgagtaacaatttcgatattgcaaacaccaaattatggaacttatttgctgaaaaaattatgatcaatgtgaagtttaaattattataccataaatatatcaaagatttttttgaggaaggtaaaaattgcatggaatgggctgcccaacgtgatagctcacttttatgctaggtagcattaccaaagatgggaacgttctgatgaacaccaaacccactcaaataatatttatatttgggttgtttagttgtaaaagtgaagacccaagtttaaagtaccaattggccaatgccattcgattgttttgttcaaagagcacttggtacgtcatttggactcgtatcttagtccaatatattgcattttgcttcaatgtgtagaatccgacaaagtgcatgttctaaaattgtaaatctaactaaattagaaagcttgttactaattt

SEQ ID NO: 99 - DNA, 191 bp, Cauliflower mosaic virus
ctcgagtttctccataataatgtgtgagtagttcccagataagggaattagggttcctatagggtttcgctcatgtgttgagcatataagaaacccttagtatgtatttgtatttgtaaaatacttctatcaataaaatttctaattcctaaaaccaaaatccagtactaaaatccagatcccccgaatta

SEQ ID NO: 100 - DNA, 250 bp, Agrobacterium tumefaciens
cgttcaaacatttggcaataaagtttcttaagattgaatcctgttgccggtcttgcgatgattatcatatatatttctgttgattacgttaagcatgtaataattaacatgtaatgcatgacgttatttatgagatgggtttttatgattagagtcccgcaattatacatttaatacgcgatagaaaacaaaatatagcgcgcaaactaggataaattatcgcgcgcggtgtcatctatgttactagatc

SEQ ID NO: 101 - DNA, 68 bp, tobacco mosaic virus
gtatttttacaacaattaccaacaacaacaaacaacaaacaacattacaattactatttacataaacc

SEQ ID NO: 102 - DNA, 510 bp, figwort mosaic virus; identical to SEQ ID NO: 68

SEQ ID NO: 103 - DNA, 493 bp, figwort and cauliflower mosaic virus/synthetic
agctgcttgtggggaccagacaaaaaaggaatggtgcagaattgttaggcgcacctaccaaaagcatctttgcctttattgcaaagataaagcagattcctctagtacaagtggggaacaaaataacgtggaaaagagctgtcctgacagcccactcactattgcgtttgacgaacgcagtgacgaccacaaaactcgagacttttcaacaaagggtaatatccggaaacctcctcggattccattgcccagctatctgtcactttattgtgaagatagtggaaaaggaaggtggctcctacaaatgccatcattgcgataaaggaaaggctatcgttgaagatgcctctgccgacagtggtcccaaagatggacccccacccacgaggagcatcgtggaaaaagaagacgttccaaccacgtcttcaaagcaagtggattgatgtgatatctccactgacgtaagggatgacgaacaatcccactatccttc

SEQ ID NO: 104 - DNA, 413 bp, Glycine max
gtatgttatgtatctcactctgctcatctctttcatatgtgtttctgatctttctacctctgggttgtaattaatgctaatagtgtgagagtgcttaattctctatcagtaatgaaaattttgtctgctttaattattttgttcaagtggggtctcaattacaatcaccccttttcaagtttgaatatgcttctagcgtttttgggacttgagttcatatgggggtctcttcctttcttaaattttgtgtttttccttgattcaatcattattgaaaattaagttcaattgggggtctcagtctcagagcatttggcttttgaatcatatgatctttcgataggtgtttaaaaagtaatcgactttcagtttcttgatctgaataatcagtctttcattgtctgcgcatgtag

SEQ ID NO: 105 - DNA, 107 bp, Zea mays
gtaactaaccactgccgccgcccatttcttcttcgaccggttgccgcctgcgcgcggcactgctcgtacgtctccccgccagtgcttactgtaatgcatgcatgcag

SEQ ID NO: 106 - DNA, 110 bp, Mus musculus
gattcgtcagtagggttgtaaaggtttttcttttcctgagaaaacaaccttttgttttctcaggttttgctttttggcctttccctagctttaaaaaaaaaaaagcaaaa

SEQ ID NO: 107 - protein, 1272 aa, Uncultured Clostridium sp. isolate 2789STDY5608795
MEDKQFLERYKEFIGLNSLSKTLRNSLIPVGSTLKHIQEYGILEEDSLRAQKREELKGIMDDYYRNYIEMHLRDVHDIDWNELFEALTEVKKNQTDDAKKCLEKIQEKKRKEIYQYLSDDAVFSEMFKEKMISGILPDFIRCNEEYSEEEKEEKLKTVALFHRFTSSFNDFFLNRKNVFTKEAIATAIGYRVVHENAEIFLENMVAFQNIQKSAESQISIIERKNEHYFMEWKLSHIFTADYYMMLMTQKAIEHYNEMCGVVNQHMKEYCQKEKKNWNLYRMKRLHKQILSNASTSFKIPEKYENDAEVYESVNSFLQNVMEKTVMERIAVLKNNTDNFDLSKIYITAPYYEKISNYLCGSWNTIADCLTHYYEQQIAGKGARKDQKVKAAVKADKWKSLSEIEQLLKEYARAEEVKRKPEEYIAEIENIVSLKEVHLLEYHPEVNLIENEKYATEIKDVLDNYMELFHWMKWFYIEEAVEKEVNFYGELDDLYEEIRDIVPLYNKVRNYVTQKPYSDTKIKLNFGTPTLANGWSKSKEYDYNAILLQKDGKYYMGIFNPVQKPEKEIIEGHSHPLEGNEYKKMVYYYLPSANKMLPKVLLSKKGMEIYQPSEYIINGYKERRHIKSEEKFDLQFCHDLIDYFKSGIERNPDWKVFGFHFSDTDTYQDISGFYREVEDQGYKIDWTYIKEADIDRLNEEGKLYLFQIYNKDFSEKSTGRENLHTMYLKNLFSEENIREQVLKLNGEAEIFFRKSSVKKPIIHKKGTMLVNRTYMEEMHGESVKKNIPEKEYQEIYNYMNHRWKGELSAEAKEYLKKAVCHETKKDIVKDYRYSVDKFFIHLPITINYRASGKEALNSVAQRYIAHQNDMHVIGIDRGERNLIYVSVINMQGEIIEQKSFNVVNKYNYKEKLKEREQNRDEARKNWKEIGQIKDLKEGYLSGVIHEIAKMMIKYHAIVAMEDLNYGFKRGRFKVERQVYQKFENMLIQKLNYLVFKDRSADEDGGVLRGYQLAYIPDSVKKLGRQCGMIFYVPAAFTSKIDPATGFVDIFNHKAYTTDQAKREFILSFDEICYDVERQLFRFTFDYANFATHNVTLARNNWTIYTNGTRTQKEFVNRRVRDKKEVFDPTEKMLKLLELEGVEYQSGANLLPKLEKISDPHLFHELQRIVRFTVQLRNSKNEENDVDYDHVISPVLNEEGKFFDSSKYENKEEKKESLLPVDADANGAYCIALKGLYIMQAIQKNWSEEKALSPDVLRLNNNDWFDYIQNKRYR

SEQ ID NO: 108 - protein, 1247 aa, Uncultured bacterium (gcode 4) ACD_3C00058, whole genome shotgun sequence
MFKGDAFTGLYEVQKTLRFELVPIGLTQSYLENDWVIQKDKEVEENYGKIKAYFDLIHKEFVRQSLENAWLCQLDDFYEKYIELHNSLETRKDKNLAKQFEKVMKSLKKEFVSFFDAKWNEWKQKFSFLKKWWIDVLNEKEVLDLMAEFYPDEKELFDKFDKFFTYFSNFKESRKNFYADDGRAWAIATRAIDENLITFIKNIEDFKKLNSSFREFVNDNFSEEDKQIFEIDFYNNCLLQPWIDKYNKIVWWYSLENWEKVQWLNEKINNFKQNQNKSNSKDLKFPRMKLLYKQILGDKEKKVYIDEIRDDKNLIDLIDNSKRRNQIKIDNANDIINDFINNNAKFELDKIYLTRQSINTISSKYFSSWDYIRWYFWTGELQEFVSFYDLKETFWKIEYETLENIFKDCYVKGINTESQNNIVFETQGIYENFLNIFKFEFNQNISQISLLEWELDKIQNEDIKKNEKQVEVIKNYFDSVMSVYKMTKYFSLEKWKKRVELDTDNNFYNDFNEYLEGFEIWKDYNLVRNYITKKQVNTDKIKLNFDNSQFLTWWDKDKENERLGIILRREWKYYLWILKKWNTLNFGDYLQKEWEIFYEKMNYKQLNNVYRQLPRLLFPLTKKLNELKWDELKKYLSKYIQNFWYNEEIAQIKIEFDIFQESKEKWEKFDIDKLRKLIEYYKKWVLALYSDLYDLEFIKYKNYDDLSIFYSDVEKKMYNLNFTKIDKSLIDGKVKSWELYLFQIYNKDFSESKKEWSTENIHTKYFKLLFNEKNLQNLVVKLSWWADIFFRDKTENLKFKKDKNGQEILDHRRFSQDKIMFHISITLNANCWDKYWFNQYVNEYMNKERDIKIIWIDRWEKHLAYYCVIDKSWKIFNNEIWTLNELNWVNYLEKLEKIESSRKDSRISWWEIENIKELKNGYISQVINKLTELIVKYNAIIVFEDLNIWFKRWRQKIEKQIYQKLELALAKKLNYLTQKDKKDDEILWNLKALQLVPKVNDYQDIWNYKQSWIMFYVRANYTSVTCPNCWLRKNLYISNSATKENQKKSLNSIAIKYNDWKFSFSYEIDDKSWKQKQSLNKKKFIVYSDIERFVYSPLEKLTKVIDVNKKLLELFRDFNLSLDINKQIQEKDLDSVFFKSLTHLFNLILQLRNSDSKDNKDYISCPSCYYHSNNWLQWFEFNWDANWAYNIARKGIILLDRIRKNQEKPDLYVSDIDWDNFVQSNQFPNTIIPIQNIEKQVPLNIKI

SEQ ID NO: 109 - protein, 1298 aa, Thiomicrospira sp. XS5 ZB100000
MTKTFDSEFFNLYSLQKTVRFELKPVGETASFVEDFKNEGLKRVVSEDERRAVDYQKVKEIIDDYHRDFIEESLNYFPEQVSKDALEQAFHLYQKLKAAKVEEREKALKEWEALQKKLREKVVKCFSDSNKARFSRIDKKELIKEDLINWLVAQNREDDIPTVETFNNFTTYFTGFHENRKNIYSKDDHATAISFRLIHENLPKFFDNVISFNKLKEGFPELKFDKVKEDLEVDYDLKHAFEIEYFVNFVTQAGIDQYNYLLGGKTLEDGTKKQGMNEQINLFKQQQTRDKARQIPKLIPLFKQILSERTESQSFIPKQFESDQELFDSLQKLHNNCQDKFTVLQQAILGLAEADLKKVFIKTSDLNALSNTIFGNYSVFSDALNLYKESLKTKKAQEAFEKLPAHSIHDLIQYLEQFNSSLDAEKQQSTDTVLNYFIKTDELYSRFIKSTSEAFTQVQPLFELEALSSKRRPPESEDEGAKGQEGFEQIKRIKAYLDTLMEAVHFAKPLYLVKGRKMIEGLDKDQSFYEAFEMAYQELESLIIPIYNKARSYLSRKPFKADKFKINFDNNTLLSGWDANKETANASILFKKDGLYYLGIMPKGKTFLFDYFVSSEDSEKLKQRRQKTAEEALAQDGESYFEKIRYKLLPGASKMLPKVFFSNKNIGFYNPSDDILRIRNTASHTKNGTPQKGHSKVEFNLNDCHKMIDFFKSSIQKHPEWGSFGFTFSDTSDFEDMSAFYREVENQGYVISFDKIKETYIQSQVEQGNLYLFQIYNKDFSPYSKGKPNLHTLYWKALFEEANLNNVVAKLNGEAEIFFRRHSIKASDKVVHPANQAIDNKNPHTEKTQSTFEYDLVKDKRYTQDKFFFHVPISLNFKAQGVSKFNDKVNGFLKGNPDVNIIGIDRGERHLLYFTVVNQKGEILVQESLNTLMSDKGHVNDYQQKLDKKEQERDAARKSWTTVENIKELKEGYLSHVVHKLAHLIIKYNAIVCLEDLNFGFKRGRFKVEKQVYQKFEKALIDKLNYLVFKEKELGEVGHYLTAYQLTAPFESFKKLGKQSGILFYVPADYTSKIDPTTGFVNFLDLRYQSVEKAKQLLSDFNAIRFNSVQNYFEFEIDYKKLTPKRKVGTQSKWVICTYGDVRYQNRRNQKGHWETEEVNVTEKLKALFASDSKTTTVIDYANDDNLIDVILEQDKASFFKELLWLLKLTMTLRHSKIKSEDDFILSPVKNEQGEFYDSRKAGEVWPKDADANGAYHIALKGLWNLQQINQWEKGKTLNLAIKNQDWFSFIQEKPYQE

SEQ ID NO: 110 - protein, 1318 aa, Flavobacterium branchiophilum FL-15
MTNKFTNQYSLSKTLRFELIPQGKTLEFIQEKGLLSQDKQRAESYQEMKKTIDKFHKYFIDLALSNAKLTHLETYLELYNKSAETKKEQKFKDDLKKVQDNLRKEIVKSFSDGDAKSIFAILDKKELITVELEKWFENNEQKDIYFDEKFKTFTTYFTGFHQNRKNMYSVEPNSTAIAYRLIHENLPKFLENAKAFEKIKQVESLQVNFRELMGEFGDEGLIFVNELEEMFQINYYNDVLSQNGITIYNSIISGFTKNDIKYKGLNEYINNYNQTKDKKDRLPKLKQLYKQILSDRISLSFLPDAFTDGKQVLKAIFDFYKINLLSYTIEGQEESQNLLLLIRQTIENLSSFDTQKIYLKNDTHLTTISQQVFGDFSVFSTALNYWYETKVNPKFETEYSKANEKKREILDKAKAVFTKQDYFSIAFLQEVLSEYILTLDHTSDIVKKHSSNCIADYFKNHFVAKKENETDKTFDFIANITAKYQCIQGILENADQYEDELKQDQKLIDNLKFFLDAILELLHFIKPLHLKSESITEKDTAFYDVFENYYEALSLLTPLYNMVRNYVTQKPYSTEKIKLNFENAQLLNGWDANKEGDYLTTILKKDGNYFLAIMDKKHNKAFQKFPEGKENYEKMVYKLLPGVNKMLPKVFFSNKNIAYFNPSKELLENYKKETHKKGDTFNLEHCHTLIDFFKDSLNKHEDWKYFDFQFSETKSYQDLSGFYREVEHQGYKINFKNIDSEYIDGLVNEGKLFLFQIYSKDFSPFSKGKPNMHTLYWKALFEEQNLQNVIYKLNGQAEIFFRKASIKPKNIILHKKKIKIAKKHFIDKKTKTSEIVPVQTIKNLNMYYQGKISEKELTQDDLRYIDNFSIFNEKNKTIDIIKDKRFTVDKFQFHVPITMNFKATGGSYINQTVLEYLQNNPEVKIIGLDRGERHLVYLTLIDQQGNILKQESLNTITDSKISTPYHKLLDNKENERDLARKNWGTVENIKELKEGYISQVVHKIATLMLEENAIVVMEDLNFGFKRGRFKVEKQIYQKLEKMLIDKLNYLVLKDKQPQELGGLYNALQLTNKFESFQKMGKQSGFLFYVPAWNTSKIDPTTGFVNYFYTKYENVDKAKAFFEKFEAIRFNAEKKYFEFEVKKYSDFNPKAEGTQQAWTICTYGERIETKRQKDQNNKFVSTPINLTEKIEDFLGKNQIVYGDGNCIKSQIASKDDKAFFETLLYWFKMTLQMRNSETRTDIDYLISPVMNDNGTFYNSRDYEKLENPTLPKDADANGAYHIAKKGLMLLNKIDQADLTKKVDLSISNRDWLQFVQKNK

SEQ ID NO: 111 - protein, 1251 aa, Moraxella bovoculi strain 57922
MLFQDFTHLYPLSKTVRFELKPIGRTLEHIHAKNFLSQDETMADMYQKVKVILDDYHRDFIADMMGEVKLTKLAEFYDVYLKFRKNPKDDGLQKQLKDLQAVLRKESVKPIGSGGKYKTGYDRLFGAKLFKDGKELGDLAKFVIAQEGESSPKLAHLAHFEKFSTYFTGFHDNRKNMYSDEDKHTAIAYRLIHENLPRFIDNLQILTTIKQKHSALYDQIINELTASGLDVSLASHLDGYHKLLTQEGITAYNRIIGEVNGYTNKHNQICHKSERIAKLRPLHKQILSDGMGVSFLPSKFADDSEMCQAVNEFYRHYTDVFAKVQSLFDGFDDHQKDGIYVEHKNLNELSKQAFGDFALLGRVLDGYYVDVVNPEFNERFAKAKTDNAKAKLTKEKDKFIKGVHSLASLEQAIEHHTARHDDESVQAGKLGQYFKHGLAGVDNPIQKIHNNHSTIKGFLERERPAGERALPKIKSGKNPEMTQLRQLKELLDNALNVAHFAKLLTTKTTLDNQDGNFYGEFGVLYDELAKIPTLYNKVRDYLSQKPFSTEKYKLNFGNPTLLNGWDLNKEKDNFGVILQKDGCYYLALLDKAHKKVFDNAPNTGKNVYQKMVYKLLPGPNKMLPKVFFAKSNLDYYNPSAELLDKYAKGTHKKGDNFNLKDCHALIDFFKAGINKHPEWQHFGFKFSPTSSYRDLSDFYREVEPQGYQVKFVDINADYIDELVEQGKLYLFQIYNKDFSPKAHGKPNLHTLYFKALFSEDNLADPIYKLNGEAQIFYRKASLDMNETTIHRAGEVLENKNPDNPKKRQFVYDIIKDKRYTQDKFMLHVPITMNFGVQGMTIKEFNKKVNQSIQQYDEVNVIGIDRGERHLLYLTVINSKGEILEQRSLNDITTASANGTQVTTPYHKILDKREIERLNARVGWGEIETIKELKSGYLSHVVHQINQLMLKYNAIVVLEDLNFGFKRGRFKVEKQIYQNFENALIKKLNHLVLKDKADDEIGSYKNALQLTNNFTDLKSIGKQTGFLFYVPAWNTSKIDPETGFVDLLKPRYENIAQSQAFFGKFDKICYNTDKGYFEFHIDYAKFTDKAKNSRQKWAICSHGDKRYVYDKTANQNKGAAKGINVNDELKSLFARYHINDKQPNLVMDICQNNDKEFHKSLMCLLKTLLALRYSNASSDEDFILSPVANDEGVFFNSALADDTQPQNADANGAYHIALKGLWLLNELKNSDDLNKVKLAIDNQTWLNFAQNR

SEQ ID NO: 112 - protein, 1285 aa, Candidatus Roizmanbacteria bacterium GW2011_GWA2_37_7 US54_C0016
MKSFDSFTNLYSLSKTLKFEMRPVGNTQKMLDNAGVFEKDKLIQKKYGKTKPYFDRLHREFIEEALTGVELIGLDENFRTLVDWQKDKKNNVAMKAYENSLQRLRTEIGKIFNLKAEDWVKNKYPILGLKNKNTDILFEEAVFGILKARYGEEKDTFIEVEEIDKTGKSKINQISIFDSWKGFTGYFKKFFETRKNFYKNDGTSTAIATRIIDQNLKRFIDNLSIVESVRQKVDLAETEKSFSISLSQFFSIDFYNKCLLQDGIDYYNKIIGGETLKNGEKLIGLNELINQYRQNNKDQKIPFFKLLDKQILSEKILFLDEIKNDTELIEALSQFAKTAEEKTKIVKKLFADFVENNSKYDLAQIYISQEAFNTISNKWTSETETFAKYLFEAMKSGKLAKYEKKDNSYKFPDFIALSQMKSALLSISLEGHFWKEKYYKISKFQEKTNWEQFLAIFLYEFNSLFSDKINTKDGETKQVGYYLFAKDLHNLILSEQIDIPKDSKVTIKDFADSVLTIYQMAKYFAVEKKRAWLAEYELDSFYTQPDTGYLQFYDNAYEDIVQVYNKLRNYLTKKPYSEEKWKLNFENSTLANGWDKNKESDNSAVILQKGGKYYLGLITKGHNKIFDDRFQEKFIVGIEGGKYEKIVYKFFPDQAKMFPKVCFSAKGLEFFRPSEEILRIYNNAEFKKGETYSIDSMQKLIDFYKDCLTKYEGWACYTFRHLKPTEEYQNNIGEFFRDVAEDGYRIDFQGISDQYIHEKNEKGELHLFEIHNKDWNLDKARDGKSKTTQKNLHTLYFESLFSNDNVVQNFPIKLNGQAEIFYRPKTEKDKLESKKDKKGNKVIDHKRYSENKIFFHVPLTLNRTKNDSYRFNAQINNFLANNKDINIIGVDRGEKHLVYYSVITQASDILESGSLNELNGVNYAEKLGKKAENREQARRDWQDVQGIKDLKKGYISQVVRKLADLAIKHNAIIILEDLNMRFKQVRGGIEKSIYQQLEKALIDKLSFLVDKGEKNPEQAGHLLKAYQLSAPFETFQKMGKQTGIIFYTQASYTSKSDPVTGWRPHLYLKYFSAKKAKDDIAKFTKIEFVNDRFELTYDIKDFQQAKEYPNKTVWKVCSNVERFRWDKNLNQNKGGYTHYTNITENIQELFTKYGIDITKDLLTQISTIDEKQNTSFFRDFIFYFNLICQIRNTDDSEIAKKNGKDDFILSPVEPFFDSRKDNGNKLPENGDDNGAYNIARKGIVILNKISQYSEKNENCEKMKWGDLYVSNIDWDNFVTQANARH

SEQ ID NO: 113 - protein, 1207 aa, Pseudobutyrivibrio xylanivorans
MYYQNLTKMYPISKTLRNELIPVGKTLENIRKNGILEADIQRKADYEHVKKLMDNYHKQLINEALQGVHLSDLSDAYDLYFNLSKEKNSVDAFSKCQDKLRKEIVSFLKNHENFPKIGNKEIIKLIQSLNDNDADNNALDSFSNFYTYFSSYNEVRKNLYSDEEKSSTVAYRLINENLPKSLDNIKAYAIAKKAGVRAEGLSEEEQDCLFIIETFERTLTQDGIDNYNADIGKLNTAINLYNQQNKKQEGFRKVPQMKCLYKQILSDREEAFIDEFSDDEDLITNIESFAENMNVFLNSEIITDFKNALVESDGSLVYIKNDVSKTLFSNIVFGSWNAIDEKLSDEYDLANSKKKKDEKYYEKRQKELKKNKSYDLETIIGLFDDSIDVIGKYIEKLESDITAIAEAKNDFDEIVLRKHDKNKSLRKNTNAVEAIKSYLDTVKDFERDIKLINGSGQEVEKNLVVYAEQENILAEIKNVDSLYNMSRNYLTQKPFSTEKFKLNFENPTLLNGWDRNKEKDYLGILFEKEGMYYLGIINNNHRKIFENEKLCTGKESCFNKIVYKQISNAAKYLSSKQINPQNPPKEIAEILLKRKADSSSLSRKETELFIDYLKDDFLVNYPMIINSDGENFFNFHFKQAKDYGSLQEFFKEVEHQAYSLKTRPIDDSYIYRMIDEGKLYLFQIHNKDFSPYSKGNLNLHTIYLQMLFDQRNLNNVVYKLNGEAEVFYRPASINDEEVIIHKAGEEIKNKNSKRAVDKPTSKFGYDIIKDRRYSKDKFMLHIPVTMNFGVDETRRFNDVVNDALRNDEKVRVIGIDRGERNLLYVVVVDTDGTILEQISLNSIINNEYSIETDYHKLLDEKEGDRDRARKNWTTIENIKELKEGYLSQVVNVIAKLVLKYNAIICLEDLNFGFKRGRQKVEKQVYQKFEKMLIDKLNYLVIDKSRKQEKPEEFGGALNALQLTSKFTSFKDMGKQTGIIYYVPAYLTSKIDPTTGFANLFYVKYENVEKAKEFFSRFDSISYNNESGYFEFAFDYKKFTDRACGARSQWTVCTYGERIIKYRNADKNNSFDDKTIVLSEEFKELFSIYGISYEDGAELKNKIMSVDEADFFRCLTGLLQKTLQMRNSSNDGTRDYIISPIMNDRGEFFNSEACDASKPKDADANGAFNIARKGLWVLEQIRNTPSGDKLNLAMSNAEWLEYAQRNQI

SEQ ID NO: 114 - protein, 1247 aa, Prevotella bryantii B14
MKFTDFTGLYSLSKTLRFELKPIGKTLENIKKAGLLEQDQHRADSYKKVKKIIDEYHKAFIEKSLSNFELKYQSEDKLDSLEEYLMYYSMKRIEKTEKDKFAKIQDNLRKQIADHLKGDESYKTIFSKDLIRKNLPDFVKSDEERTLIKEFKDFTTYFKGFYENRENMYSAEDKSTAISHRIIHENLPKFVDNINAFSKIILIPELREKLNQIYQDFEEYLNVESIDEIFHLDYFSMVMTQKQIEVYNAIIGGKSTNDKKIQGLNEYINLYNQKHKDCKLPKLKLLFKQILSDRIAISWLPDNFKDDQEALDSIDTCYKNLLNDGNVLGEGNLKLLLENIDTYNLKGIFIRNDLQLTDISQKMYASWNVIQDAVILDLKKQVSRKKKESAEDYNDRLKKLYTSQESFSIQYLNDCLRAYGKTENIQDYFAKLGAVNNEHEQTINLFAQVRNAYTSVQAILTTPYPENANLAQDKETVALIKNLLDSLKRLQRFIKPLLGKGDESDKDERFYGDFTPLWETLNQITPLYNMVRNYMTRKPYSQEKIKLNFENSTLLGGWDLNKEHDNTAIILRKNGLYYLAIMKKSANKIFDKDKLDNSGDCYEKMVYKLLPGANKMLPKVFFSKSRIDEFKPSENIIENYKKGTHKKGANFNLADCHNLIDFFKSSISKHEDWSKFNFHFSDTSSYEDLSDFYREVEQQGYSISFCDVSVEYINKMVEKGDLYLFQIYNKDFSEFSKGTPNMHTLYWNSLFSKENLNNIIYKLNGQAEIFFRKKSLNYKRPTHPAHQAIKNKNKCNEKKESIFDYDLVKDKRYTVDKFQFHVPITMNFKSTGNTNINQQVIDYLRTEDDTHIIGIDRGERHLLYLVVIDSHGKIVEQFTLNEIVNEYGGNIYRTNYHDLLDTREQNREKARESWQTIENIKELKEGYISQVIHKITDLMQKYHAVVVLEDLNMGFMRGRQKVEKQVYQKFEEMLINKLNYLVNKKADQNSAGGLLHAYQLTSKFESFQKLGKQSGFLFYIPAWNTSKIDPVTGFVNLFDTRYESIDKAKAFFGKFDSIRYNADKDWFEFAFDYNNFTTKAEGTRTNWTICTYGSRIRTFRNQAKNSQWDNEEIDLTKAYKAFFAKHGINIYDNIKEAIAMETEKSFFEDLLHLLKLTLQMRNSITGTTTDYLISPVHDSKGNFYDSRICDNSLPANADANGAYNIARKGLMLIQQIKDSTSSNRFKFSPITNKDWLIFAQEKPYLND

SEQ ID NO: 115 - protein, 1064 aa, Smithella sp. SCADC
MEKYKITKTIRFKLLPDKIQDISRQVAVLQNSTNAEKKNNLLRLVQRGQELPKLLNEYIRYSDNHKLKSNVTVHFRWLRLFTKDLFYNWKKDNTEKKIKISDVVYLSHVFEAFLKEWESTIERVNADCNKPEESKTRDAEIALSIRKLGIKHQLPFIKGFVDNSNDKNSEDTKSKLTALLSEFEAVLKICEQNYLPSQSSGIAIAKASFNYYTINKKQKDFEAEIVALKKQLHARYGNKKYDQLLRELNLIPLKELPLKELPLIEFYSEIKKRKSTKKSEFLEAVSNGLVFDDLKSKFPLFQTESNKYDEYLKLSNKITQKSTAKSLLSKDSPEAQKLQTEITKLKKNRGEYFKKAFGKYVQLCELYKEIAGKRGKLKGQIKGIENERIDSQRLQYWALVLEDNLKHSLILIPKEKTNELYRKVWGAKDDGASSSSSSTLYYFESMTYRALRKLCFGINGNTFLPEIQKELPQYNQKEFGEFCFHKSNDDKEIDEPKLISFYQSVLKTDFVKNTLALPQSVFNEVAIQSFETRQDFQIALEKCCYAKKQIISESLKKEILENYNTQIFKITSLDLQRSEQKNLKGHTRIWNRFWTKQNEEINYNLRLNPEIAIVWRKAKKTRIEKYGERSVLYEPEKRNRYLHEQYTLCTTVTDNALNNEITFAFEDTKKKGTEIVKYNEKINQTLKKEFNKNQLWFYGIDAGEIELATLALMNKDKEPQLFTVYELKKLDFFKHGYIYNKERELVIREKPYKAIQNLSYFLNEELYEKTFRDGKFNETYNELFKEKHVSAIDLTTAKVINGKIILNGDMITFLNLRILHAQRKIYEELIENPHAELKEKDYKLYFEIEGKDKDIYISRLDFEYIKPYQEISNYLFAYFASQQINEAREEEQINQTKRALAGNMIGVIYYLYQKYRGIISIEDLKQTKVESDRNKFEGNIERPLEWALYRKFQQEGYVPPISELIKLRELEKFPLKDVKQPKYENIQQFGIIKFVSPEETSTTCPKCLRRFKDYDKNKQEGFCKCQCGFDTRNDLKGFEGLNDPDKVAAFNIAKRGFEDLQKYK

SEQ ID NO: 116 - protein, 1251 aa, Bacteroidetes bacterium GWF2_33_38
MNHMKQFTNQFSLSKTLRFELIPQGKTKEFIEINGLIEKDNERAVSYKKVKKIIDEYHKYFIEMVLCDFKLHGLETYETIFNKKEKDDTDKKEFDNIRNSLRKQIADAFAKNPNDEIKERFKNLFAKELIKQDLLNFVDDEQKELVNEFKDFTTYFTGFHQNRRNMYVADEKATAIAYRLVNENLPKFIDNLKIYEKIKKDAPELISDLNKTLVEMEEIVQGKTLDEIFSLSFFNQTLTQTGIELYNIVIGGRTADEGKTKIKGLNEYINTDYNQKQTDKKKKQAKFKQLYKQILSDRHSVSFVAETFETDAQLLENIEQFYSSVLCNYEDDGHTTNIFEAIKNLIIGLKTFDLSKIYLRNDTSLTDISQKLFGDWSIISSALNDYYEKQNPISSKEKQEKYDERKAKWLKQDFNIETIQTALNECDSEIIKEKNNKNIVSEYFAKLGLDKDNKIDLLQKIHHNYVVIKDLLNEPYPENIKLGNQKEQVSQIKDFLDSILNLIHFLKPLSLKDKDKEKDELFYSLFTALFEHLSQTISIYNKVRNYLTQKAYSTEKIKLNFENSTLLNGWDVNKEPVNTSVIFRKNGLFYLGIMSKSNNRIFERNVPVCKNEETAFEKMNYKLLPGANKMLPKVFLSAKGIESFQPSAEIQSKYQKETHKKGDAFVRKDMENLIDFFKQSIAKHTDWKHFNHQFSKTETYNDLSEFYKEVEKQGYKLTFTKLDETYINQLVDEGKLYLFQIYNKDFSPFSKGKPNMHTLYWKMLFDEQNLQNVVYKLNGEAEVFFRQSSIKQTDRIIHKANQAIDNKNPLNNKKQSSFNYDLIKDKRFTLDKFQFHVPITLNFKAEGNEYLNTKVNEYLKSNSDVKIIGLDRGERHLIYLTLINQKGELLKQQSLNVIATSQEHETDYKNLLVNKENERANARQDWKTIETIKELKEGYLSQVVHQIATMMVDENAIVVMEDLNAGFMRGRQKVERQVYQKLEKMLIEKLNYLVFKNNDVNETAGVLNALQLTNKFESFEKMGKQSGFLFYVPAWNTSKIDPATGFVDFLKPKYESVEKAKLFFEKFESIKFNADKNYFEFEFDYKKFTEKAEGSQTKWTVCTHSDVRYRYNPQTKASDEVNVTNELKLIFDKFKIEYKNGKNLKTELLLQDDKQLFSKLLHYLALTLMLRQSKSGTDIDFILSPVAKNGVFYDSRNAMPNLPKDADANGAFHIALKGLWCVQQIKKADDLKKIKLAISNKEWLSFVQNLK

SEQ ID NO: 117 - protein, 1353 aa, Candidatus Peribacteria bacterium RIFCSPLOWO2
MANDIYAQFTRKYALSKTLRFELKPVGKTLDNMRKHLEYDPELRTFLKDQCIEDAYQALKPKVDELHQRFINLALGSARAKSMEFSPFFEIRRQLLELKMKAKEKGVGDKDIQNLEGELDGAGETLRKAFGDIFKDAGARWKELYGAYGWKKGGKETKGSAVLSCPDVLKVIDEENEKKELPEQCVRDAIKALEGFFTYLGGFNQNRENYYETAKEAATAIATRIVHENLPRFTDNALTFESGNKEYLDAYRFLKDAGKVIQRKDEKPVTPISEAIFCQNYFGNCLTQEEIERYNEEIGNCNLVINLYNQTEDEEGFRRLPIFKVLYKQIGCGKKDALFFRLTHEKKEDADAARRENPNKQFDSVEEILERARTAGEKYFQPNKTADMDTLSEFIRYLKERKDYSGFYWSKNALNTISNKYFANWHALKDRLKETGVFKKGGKDDEEYVKIPDAIELQPFFELLDVTKDWRKTLFKLSQRNGSEEIEKMRIIDNAKTPHEALLGMLTLDVADRAEKFVNGAAGVMRVTREYFANADKMKEERRRVWKEEIKQWMDHALAVNRMLKYFKVRESKVKGAPIDATLTKALGILLYGKDGDAEWFKWYDTLRNFLTKKPQDDAKENKLKLNFENGSLLGGWSDGQEKNKAAVLLRKDGLYYLGILKKKSLFDTKQENNPMYEHFTQGCERLILTNLKFQTLAGKGFSRKFRIAYGAMGKQDPQKAIISLQDIMKERYLNKYPLLSPIASASYTDKKKFDKEVQEALKESYDCKFRKINWNEIEQYTKSGDMYLFQIHSKDFAPGASGKKDLQTIYWQSLFDSNGSHQLNGGGEIFYRKQALRDKHVKKGYEQKPWIIESRRFTLESGKFMFHCPIKLNYKSSAQSDPKYAFPFVNKYINEHFAGNADICFLGIDRGEKHLAYYSLVDSRGTIVDQGTLNIPFTDSKGNPRTVRAIKRTLDKNGHEWVEEVECSNYNDLLAARAGDRDYARKNWQTIGTIKELKEGYISQVIHKIVRLAALDSDKPMFIVLEDLSIGFMRGRQKIEKSVYKQFEVALAKKLSFLVDKSKDGKYGEVGSVTAALQLTPPIKNFDELKERGKQAGVMLFVRPDYTSQTDPVTGWRKRIYIDSGSELTIRKKVTESFEDIAFDGKDYVFVYKDVVTGKCWSMYSGKDGESLKRFHRVRSVDKDEWKSEPQNLAEMLDCLFKDFDKDRSLLSQIVDEGMQPKKVNEHSAWESFRFVIKLIQQIRNTDGGDGGRESDFLLSPVREHGNHFDSRPYWDEEQRTGHPALLPSCGDANGAYNIARKGIILHEHMKRDFKLYVRDEEWDSWLAGKETWDNWLRNHEKDLRKTPRKGG

SEQ ID NO: 118 - protein, 1289 aa, Nitrospinae bacterium RIFCSPLOWO2
MENKELFNSFTKKCQLSKTLRFELVPQGETEKFIKKKGLLKQDKDRADDYRKAKKLIDEYHKDFIEHALSGKQLKKLQAYYDEFTALLGKPAKERDTRVLSNISEALRKEIAGWLKDNPIKDEKKLIKEIVPNFLKSKDRNDDAALVLKFKGFTTYFGGFNENRRNMYSAEEKSTAIAYRIVHENLPKFISNMKTFQRLTENHKIDFLEVETQMNDELDGNKLKDVFSIDYFNQCLTQSGIDRYNTILGGKTDSRGAQIQGVNIKINLFGQKNNLKSKDAPVLARLYKQILSDRTSASFLPEKFETAKELIASIREFYEKAINGFIKNNERKNVIDEIESLFNKKLNPTDCDLSQIYIRNIFISAVSQQIFGSYSVITSALNAFIDKTYKTKKEKEKQQKKSYFGIAEIEAALKAYLQETEIENKEKREEVLKHANPVLQYLNSLTTNIEINNKKEKANVIVRFRQQHEAVQSVLNKEYGNNSELIQDKNAVAAIKDYLDSCQHILHFVKPLFVVPPKKENAELPDKDAFYSEFDELFEQLKSVTPLYNMVRNFLTQKPYSTEKIKLNFENVSLLSGWDVNKETDNTSVIFRKDSLYYLGIMDKKHNKVFHDIPASSDNDFYEKMNYKLLPGANKMLPKVIFSDRWIEYFNPSKELIEKYKKGTHKKGEIFSLSDCHALIDFFKTSIAKHEDWKQFNFQFSPTKTYQDINEFYREVEHQGYKISFQNVSAKYIHQLVSEGKLFLFKIYNKDFSPYSKGKPNLHTLYWKAVFDKENLKDVVVKLNGEAEVFYRPQSIPKKSKIVHKKNKPIVNKNPNNPKKQSLFKEYDIVKDKRYTEDKYHFHVPITLNFKEAKVPSENDRKKAFAYTFNKGANETLKENFPNIIGIDRGERHLAYYSLINSKGEILEQGSFNVIKNEFNGTKHETDYYASLVEKEKARDAARKSWDTIGKIKELKEGYLSQVVHKIARMMIEHNAIIVLEDLTMKFKDIRKKVERQVYQKLEKMLIDKLNYLVFKDREAYEPGGVLNAYQLAAPFTSFKDMGKQTGFIFYVPAANTSKIDYATGFMNFIYPKIEDAVEFFQKFEYIRFNPDKNYFEFAARYNNFVKDDEAKLPDEYNEPWIICTHGEQRFQYQPSYKSFKEVNVTQELQDLFSKHAIMPYAHGNDLSPQIKDKGNTSFYKGLIALLRLVLQMRYTDGKGRDFILSPVANDEGVFFNSEKAKETEPNDADANGAYHIALKGLLLLKRIKGEFKKEEKTGKKKTQKENWIDLSISNKEWYEFAQKKEYRK

SEQ ID NO: 119 - protein, 1342 aa, Candidatus Ryanbacteria bacterium RIFCSPHIGHO2
MANEKKEKSIFDEFTGKYSLSKTLKFELRPVGKTLENMRQHLGYDKNLQTFLADQKIEDAYQSLKPIFDFLHEKFITESLESDVARKIDFTEYFEKYKRRKDLSEKDFVGVEKSLRDEFLKAYDETAESLRIKAGKNEKGKFILSENGHKILTEHGILEYIKKNIDEFVEITPEREIEKSLAAFEGFFTYFGGFNQNRENYYETKKETATSVATRVIHENLPKFCDNILAFDGRSRDYKNAYSILQKLGRTLVDKEGKELIPIEENIFKIEYFNSCMSQRGVEKYNDQIGNANFLINLYNQAKKEENGFKKLPLLKTLYKQIGCGEKRSLFFAINYDQADECKKQENNTEIRSLEEVLNLANKAGKKYFKGKSDDGMINTLPEFLEYLKNRENYLGVYWSKTALNTISSKYFTNWHTLKERLKEAKVFKKAGKDSEEEIMIPEAVELEGFFSVLDVVENWKDEGVLFKQNLTEAQKGAQGEDKNKARKDIILNASIPSEALLNLIFLGIEQHAKAFLDRAPEVLALKEYKNATSKEVIKSWMDHALSITQMLKYFLVKESKVKGTALDSTISQALEVFLQSDDADWFGWYDALRNYLTKKPQDDLKENKLKLNFENSTLASGWDVSKEPDNYCVIFQNPEGEKFLAIIARKKDRKGFNKIFEKNNHNRLYTVSGNKNWKKIEYKLLPGPNKMLPKCLMPKSDRFKYGATQEILDIYDEGSFKKNEVSFSIQKLYKMIDFYKMALERYKDWGCFNFSFQETSKYQDISQFYNDVEKQGYKLDVVDINKSIVDSLVEDGSIYLFEIKNQDSNQGKKENHRDNLHTIYWRAVFESVENRPKLNGGAEIFYRKALLPEKLERNEDRKGKKIIKNPRFSKEKFLFHVPITLNFSSKNTRINDLVNDILSRYGDVHFLGIDRGEKHLAYYSLVDQNGRIKDHGTLNIPFLDKDGNSRMVRAKKRTLGKDGKEQIEMVECKDYNELLDARAGDRDYARKNWQTIGTIKDLKDGYISQVVRTIADLALANNAFIVLESLDTGFKRGRQKIEKSVYQKLELALAKKLNFLVDKKAKFGEIGSVTNALQLTPPVANYGDIENRKQLGVMLYVKADYTSQTDPITGWRKSIYLKKGSEEYIRSQIRDGFSDISFDGKDYVFTYEDKNTHKQWKLYSGKNGKSLDRYHREKGETRNSWDPIRKDVTEMLNGIFENFNRSNSIHSQIVDEGVELKKIDSAHTAWESLRFTIDLIQQIRNTGTAKEDDDFILSPVRDENGNHFDSRKTIKYQPNSGDANGAYNIARKGIVLNEHIKRGYRLFISDEEWDAWLAGKERWEKWISDHKKDLAKKQTAQ

SEQ ID NO: 120 - protein, 1390 aa, Candidatus Wildermuthbacteria bacterium RIFCSPHIGHO2
MIDNTKEKKEGSVFDGFTRKYQLSKTLRFELRPILNTPKMLDDEQVIKNDETRRKKYEAVKPWFDQLHREFIEDALKSFKFKNLAIYQDTFQTWQKDRKSKQKKDTLVKIEVGLREEIVRRFEEVANIWVRSEQYKLLGIKKEGLGMLFEAGVFRLLKERFKNEKDTTVDGNNIFDEWTRWTGYFKKFFETRKNFYKSDDTSTAIAYRVINQNLRRFCENIQIFEKISEKIEFSEVEKSFDISCAGIFSLAYYNACLLQGGIDTYNKIIGGEVDEKDKKIPGINELINKYRQDNSGEKIPFLKQLDKQIHSAKEAFIESIETNKELVGKLKTFYENAEVKIQSFRNLIADIVTDYSGYDIDKIYLTKEAVSHNASRWFASFESFERDLFAVVAEKQNKLVYELLRTHKNDSKISDKDGKFSFPDFIKCSHIKRALEKQEGRIWKGEYYEDIVDFEKIKDVFTQFLCVFKFELEQQFFRKTTSAQTGEQTKIGYEIFVTKINELITRENPVIDLEEKIAIKNFADATLLIYQIAKYFAVEKRRGWLDNYDLDDRFYKSSDIGYLNFYRDAFEQIVRPYNLFRNYLTKKPYNTNKWVLSFENPTLADGWDKNKEKTNAAVILRKDGRYYLGIIKEDCKSLFADRYSKEMSEGIESGSFQKMAYKFFPEASKMIPKCSTQTKNVKEHFRKSSSDYNLFHEKDYKISVAITKNIYELNNVFYRKDNIEESFVPKNDFEKKLGVKKFQRQYLEISRDNNGYKQALAQWIEFCIRFLKAYKSTTIFDYSRLREAKEYESLDAFYQDINALTYNISFVPISEQYIKEKNDNGELFLFEIYNKDWSLGPMDKNRKRTKNLHTLYFEQLFSKENEQENFLFQLNGEAELFFRPKTEEKRLGYKVWDAGEKKWVKAKEKEDGAVIDRKRYAKDIILFHCPITLNRVSESKTKREMDVEIREVLSSTPGVHIIGVDRGEKHLAYYSVIDQNGKIIETDTLNSIGKDGRGKPVEYASKLEKRAQEREASRRDWEEVEAIKDLKKGYISQVIRNLADLIIKHNAIIVFEDLNMRFKQIRGGIEKSAYQQLERALIDKLSFLVKKGEEDPKQTGHILRAYQLAAPVIAFKDMGKQTGLIFYTQAGYTSKTCPECGYRRNIKCLFENIEQAKTLIENLESINYNKKEDVFQISYSLEKLSSKDQKKEKKVSNELYAKTLKKDIFILTTKNALRYKWYDRYSEKAKVAKRGIDEYKGEVNESETKKGVVKEFNLTEYLKGLLKTYEIDYEHGGIREQILSVARGREFYKDFLYALFLLTETRHSISGRNTDYIQCPECEFDSRKGFKDIKEFNGDANGAYNIARKGIMILEKIKQFKKDNDGNLEKMGWGDLSISIEEWDKFTQKE

SEQ ID NO: 121 - protein, 1265 aa, Firmicutes bacterium CAG_194_44_15
MERKDFINYDQVSKTIRNGLIPTEYTLKNIEETGVLVSDEYRAEVRNVLKKIMDDYYKEYINMCLNREIKMDWRPLFDAYELVKKGKMKPKEIENIQDEKRKEIYDILSAHDEFKKMFSAKMITELLPQFISQSTGYNEDEKKQYEEVIHIYSRFTSDFTDFFQNRKNVFSSAGIATSICNRIVNENAEIFSDNKSTFDRIKKDISYIDEIIDSDLKTYLDGWELEQIYSVDFYSRLMSQSGIDFYNMISGAVNKAVNEYCQKNGLNKNKYLLRKLRKQILSNSESTFQIPEKFLADEEVYKAVGQFIDNIKSKNVIEILKDIGSNCENYDLRRIYIAESAYEDVSIFMGYGWNGIKGCLEKKYEKEIAPGKAKDIKIKKLISQEKERSIGEIDELFHIYGEEKDGKAAIQYIEEVVELCNEVPTRLVYDSSEKLTENDNKAAEIKNVLDYYFKIFHWIKTFITDDILDKDIVFYSGIEFAYEEIKDIVPLYNKVRNYVTQKPYSSEKIKLKFGTPTLANGWSKSKEFDNNAILLVRDNKYYLGIFNVLNKPDKKIMAGYANKKNSSDYAKMVYNLLPGPSKMLPKVCLSQKGKDTYHPSAYIVDNYERKAHVKSSEHFSIQYCHDLIDYFKECIKRNDDWKCFDFKFSDTEQYNDISEFYKEVELQGYSIGWTYISGEDIEALDKEGKLYLFQIYNKDFSEQSHGTDNLHTMYLKNLFSPENLNNIVLKLNGEAELFYRKSSIKKPVVHKKGSILVNKTYTEKTGNGEEVRRPVPDDVYLELVNYYNGEQKAILSDEAKKYMKVVEHHEAVKDITKDYRYTVNKFFIHLPITINFKAEHTGNLNEMVIQYIAKQENMHVIGIDRGERNLIYVSVIDMNGKIKEQKSFNIVNSYNYQEKLRGREKDRLNARKNWKQIANIKEMKEGYLSLVIHEITEMMMKYNAIIAMEDLNYGFKRGRFKVERQVYQKFETMLISKLNYLVDKHKKVDEPGGLLRGYQFAYVPASLDRLGRQCGFIFYVPAAYTSKIDPTTGFVDLFNHSELIKAGKRRDNLSKFDGIYYDEQKDMFCYAFDYKNFVTHNTDIYQNSWEIYTNKERLRKIFGNGRPTGKTEKIELTQMMKEVLTGAGVEYKDGHNLIDDILNSNDNCIKQVLDIFLYSIQLRNSKGENEDSKESDYDRIISPVLNQENEFFDSVVYADKYKKDEKLADKPIDADANGAYCIALKGLYEILQIKNNWKEGEVFSRDTLKITNADWLRFMQSRGFE

SEQ ID NO: 122 - protein, 1322 aa, Candidatus Gottesmanbacteria bacterium CG1_02_37_22
MTGIFKDFTHLYELQKTLRFELIPVGRTKELLEKNHVFEKDEKIAENYKDVKKYFDRLHKEFIKDAFSHTNLPENLLEGYEQKYFSHKLNPSRASRIDLEKIAKRLRTILLKSFNTEADQWKNRYLKNIEQTLKNKNEKQQKKELEKKLKKIKEGTKGIELFFKVEVFDFLKYKYPEAQINGKSIFDPFNKFGCYFKKFHETRINFYKDDGTSTAIPTRIINDNLSIFLENKKIFESKYSKKHKSVFAKNELRIFVLFYFNNCFSQKQIDGYNNTIALINSNVNQLRQNNPEVSKKDLPFFKRLFKQILSQPSKQEIEQDSFIEIFQDEDVFPTMQKFINENKICIPKAKSIFKKFISSQKVKSDEYNISQIYVAKRFINTISNKWFSNWNTIRNLLIPKDKKNIPDFISVTSLKAALQKTQNIVEVNDLFRKEYRDILEEGSDFYQIFLKIWEKEFEKATDIYLNETKEIEKMITEDKKYLPNKKGRLKSGKKGSIQKEKFLDYTQSVFDIYLMMKYFSLEKGKERVWNPEALDEDAIGGFYEKFKEYYENINTWKYFNVFRNYLTKKPYNSEKIKLNFECSSLLSGWSKNYDSYGALIFEKNEKYYLGIINGTKFTKDEIEQLYLDIRNNNISLRLVYNYQKPDFKNFPKLFIRSSGSNFAPAVKKYNLPIDSVLNIYDKGLFKTSNKSSQNYHESLKKIIDYFKLGISQHESYKGFSFKWQETSEYDNISDFYKDATRSCYKVTWENINFSKLYELIESGRLYLFQIYNKDFELDENIAPKGYNFKDKNGRRNLHSIYWKALFSNTNFKKTILKLNGGAELFYRKLTKNLTKDPIITVKNQIKIIKKNNNIFHKKRFTQNKIYFHCPVSINFTENDWKINTKICNTIRNNSKVKIIGIDRGEKNLAYYSVIDHQGNILETDSFNEVQEREDREPTDYQKKLDQIQKERDWQRKSWQEISSIKEMKKGYISQVVHQICKLIRKYEAIVVFEDLNIGFKRGRFAIEKQIYQNLELALAKKLNYMVFKDAKEEETGHFLQAYQLTPPVINFQDIGKQCGIIFYVPASYTSAICPACGFRKNISTSVEKIEKNIDLINKFNIVYDPDKDRFCFRYKRSDFIKSEKEKEDDSKVKLYSNTKLPDDFTFYSNVERFKYIRDQNNRGGKVELKYPNDSLKKLFHENGINFQNFSNISQLIKTRNFENENFYKPFIYIISLILQLRNTTIEINQNENNEKYRDFISCPHCYFHSENNLITLTKRYKGKKPFEFNGDANGAYNIARKGILILQKINKAKRLEEIEYGGLTVTQQEYDKYLALVSSKKA

SEQ ID NO: 123 - protein, 1329 aa, Candidatus Gracilibacteria bacterium CG1_02_38_174
MSNNFQEFTQKYALSKTLRFELKPVGKTKEILEKEMPMYQIINADKNIKAKYIQTKPFFDQLHRDFIKEAFENVELSGLSDFFENWKIYKQDKKANEKIYKKSAENLRKEVVSFLNAKGKDWAEKYHSSGLKKADIEILFEEGIFKVLEIRYGTDTNSFITNATTGEITSIFQGWKGFTGYFLKFWNTRENYYKTDGTSTAIATRIVDQNLPRYLENLEIFEKMKGKIDFESVRGDFSDFEKIGTVEYYSTCLLQEGIDGYNRIIGGYTYENGEKIKGINEIINLYRQTHKDEKVPFLKTLDKQIGSEKIAFMETIDTPEEFRKIFEEFVLKSSEKVVLLKQCLNHLFENELTDGVFLSKESLNTISHKWIDIGNMKLFHESLFTILKKEGAKYDSKEDEYKFPDFIRISDIKTALVKITTESFFWKNRYLYEKDENPTGFLTSDNSLWEGFIQIFSHEFSSLFERTEKDEEGKDIQWGYDISLLNIQKLLENNEYNPNDEKNKIIIKSFADDILRIYQMGKYFALEKKRQWNPDNLEIGEFYSHPEIGYDKFYFDSYKIIVQGYNDIRNYLTKNPWSEEKWKLNFENPTLANGWDKNKETDNSCIFLKRDNKFFLALMSRGNNQVFDERNIQKFAQNIEQGKYEKMVYKYMKDVALGIPKATTQLNAVQEHFFQSDKDYIITKGGSSIGEFIKPLRVTKRIFELNNRIYPKDNLGISFLRNQVNEKEQKNYIKIFQKEFITLGGDEVVYKKAVHDWIDFCKEYTKSYPSCAYFDYSGLKDTKEYSSIDEFYNDLDSFGYQISWQDISSSYIDELVESGKLYLFEIYNQDFSNGKTGAKNLHTLYFEHIFSKENQEVNFPLKLNGQAELFFRPKSIEAKGENRKFNREIIAKKRYTEDKIFFHVPLTLNRTEGDIYGFNTEINNFLAHNPDINIIGIDRGEKHLAYYSVIDQKGNIIESDSLNTVNEINYGEKLTDTAEKRKQARQDWQAVEGIKNLKKGYISAVVHKLTDLIIKYNAIVIFEDLNMRFKQIRGGIEKSVYQQLEKALIEKLNYLVEKGEINPEKAGHLLNAYQLTAPFETFKDMGKQTGIVFYTQAAYTSKIDPVTGWRPHLYLKYSSAEQVKKEIAKFSNIIWNNTEKRFDFMYDIRNFSTQKEYPKNNIWTVCSSVERYRWDKTLNQNKGDYVHYKSITPEFEKLFSDFQIDGTKNILEQINRMETKGNEKFFKSFIFFFGLICQIRNTNKADSDENKQDFILSPVVPFFDSRDSENTKNGLPRNGDENGAYNIARKGLIILQKINEFSDENGNCDKLGWKELSISQVDWDNYIKT

SEQ ID NO: 124 - protein, 1231 aa, Butyrivibrio fibrisolvens MD2001
MYYESLTKLYPIKKTIRNELVPIGKTLENIKKNNILEADEDRKIAYIRVKAIMDDYHKRLINEALSGFALIDLDKAANLYLSRSKSADDIESFSRFQDKLRKAIAKRLREHENFGKIGNKDIIPLLQKLSENEDDYNALESFKNFYTYFESYNDVRLNLYSDKEKSSTVAYRLINENLPRFLDNIRAYDAVQKAGITSEELSSEAQDGLFLVNTFNNVLIQDGINTYNEDIGKLNVAINLYNQKNASVQGFRKVPKMKVLYKQILSDREESFIDEFESDTELLDSLESHYANLAKYFGSNKVQLLFTALRESKGVNVYVKNDIAKTSFSNVVFGSWSRIDELINGEYDDNNNRKKDEKYYDKRQKELKKNKSYTIEKIITLSTEDVDVIGKYIEKLESDIDDIRFKGKNFYEAVLCGHDRSKKLSKNKGAVEAIKGYLDSVKDFERDLKLINGSGQELEKNLVVYGEQEAVLSELSGIDSLYNMTRNYLTKKPFSTEKIKLNFNKPTFLDGWDYGNEEAYLGFFMIKEGNYFLAVMDANWNKEFRNIPSVDKSDCYKKVIYKQISSPEKSIQNLMVIDGKTVKKNGRKEKEGIHSGENLILEELKNTYLPKKINDIRKRRSYLNGDTFSKKDLTEFIGYYKQRVIEYYNGYSFYFKSDDDYASFKEFQEDVGRQAYQISYVDVPVSFVDDLINSGKLYLFRVYNKDFSEYSKGRLNLHTLYFKMLFDERNLKNVVYKLNGQAEVFYRPSSIKKEELIVHRAGEEIKNKNPKRAAQKPTRRLDYDIVKDRRYSQDKFMLHTSIIMNFGAEENVSFNDIVNGVLRNEDKVNVIGIDRGERNLLYVVVIDPEGKILEQRSLNCITDSNLDIETDYHRLLDEKESDRKIARRDWTTIENIKELKAGYLSQVVHIVAELVLKYNAIICLEDLNFGFKRGRQKVEKQVYQKFEKMLIDKLNYLVMDKSREQLSPEKISGALNALQLTPDFKSFKVLGKQTGIIYYVPAYLTSKIDPMTGFANLFYVKYENVDKAKEFFSKFDSIKYNKDGKNWNTKGYFEFAFDYKKFTDRAYGRVSEWTVCTVGERIIKFKNKEKNNSYDDKVIDLTNSLKELFDSYKVTYESEVDLKDAILAIDDPAFYRDLTRRLQQTLQMRNSSCDGSRDYIISPVKNSKGEFFCSDNNDDTTPNDADANGAFNIARKGLWVLNEIRNSEEGSKINLAMSNAQWLEYAQDNTI

SEQ ID NO: 125 - protein, 999 aa, Sneathia amnii strain SN35
MNLLINEVNQKYKSKLNVFNSLYKQILTEEDTKSFVDEILLTPESVIKTIDNFIDSIIMNDIEGLKEEFLKISLENFEGIYISNKKLNEISNRKFGDYNSINMMIKQSMNEKGILSKKEINELIPDLENINKPKVKSFNLSFIFENLTKEHKELIIDYIRENICNVIENVKITIEKYRNIDNKIEFKNNAEKVSKIKEMLESINELCKLIKEFNTDEIEKNNEFYNILNKNFEIFESSYKVLNKVRNFVTKKEVIENKMKLNFSNYQLGNGWHKNKEKDCSIILFRKRNNERWIYYLGILKHGTKIKENDYLSSVDTGFYKMDYYAQNSLSKMIPKCSITVKNVKNAPEDESVILNDSKKFNEPLEITPEIRKLYGNNEHIKGDKFKKESLVKWIDFCKEFLLKYKSFEKAKKEILKLKESNLYENLEEFYSDAEEKAYFLEFINIDEDKIKKLVKEKNLYLFQIYNKDFSAYSTGNKNLHTMYFEELFTDENLKKPVFKLNGNTEVFYRIASSKPKIVHNKGEKLVNKTYLDDGIIKTIPDSVYEEISEKVKNNEDYSKLLEENNIKNLEIKVATHEIVKDKRYFENKFLFYLPITLNKKVSNKNTNKNINKNVIDEIKDCNEYNVIGIDRGERNLISLCIINQNGEIILQKEMNIIQSSDKYNVDYNEKLEIKSKERDNAKKNWSEIGKIKDLKSGYLSAVVHEIVKLAIEYNAVIILEDLNNGFKNSRKKVDKQIYQKFERALIEKLQFLIFKNYDKNEKGGLRNAFQLTPELKNITKVASQQGIIIYTNPAYTSKIDPTTGYANIIKKSNNNEESIVKAIDKISYDKEKDMFYFDINLSNSSFNLTVKNVLKKEWRIYTNGERIIYKDRKYITLNITQEMKDILSKCGIDYLNIDNLKQDILKNKLHKKVYYIFELANKMRNENKDVDYIISPVLNKDGKFFMTQEINELTPKDADLNGAYNIALKGKLMIDNLNKKEKFVFLSNEDWLNFIQGR

SEQ ID NO: 126 - protein, 1287 aa, Coprococcus eutactus strain 2789STDY5608843
MNNNTNNSFEPFIGGNSVSKTLRNELRVGSEYTGKHIKECAIIAEDAVKAENQYIVKEMMDDFYRDFINRKLDALQGINWEQLFDIMKKAKLDKSNKVSKELDKIQESTRKEIVKIFSSDPIYKDMLKADMISKILPEYIVDKYGDAASRIEAVKVFYGFSGYFIDFWASRKNVFSDKNIASAIPHRIVNVNARIHLDNITAFNRIAEIAGDEVAGIAEDACAYLQNMSLEDVFTGACYGEFICQKDIDRYNNICGVINQHMNQYCQNKKISRSKFKMERLHKQILCRSESGFEIPIGFQTDGEVIDAINSFSTILEEKDILDRLRTLSQEVTGYDMERIYVSSKAFESVSKYIDHKWDVIASSMYNYFSGAVRGKDDKKDAKIQTEIKKIKSCSLLDLKKLVDMYYKMDGMCLEHEATEYVAGITEILVDFNYKTFDMDDSVKMIQNEHMINEIKEYLDTYMSIYHWAKDFMIDELVDRDMEFYSELDEIYYDLSDIVPLYNKVRNYVTQKPYSQDKIKLNFGSPTLANGWSKSKEFDNNVVVLLRDEKIYLAILNVGNKPSKDIMAGEDRRRSDTDYKKMNYYLLPGASKTLPHVFISSNAWKKSHGIPDEIMYGYNQNKHLKSSPNFDLEFCRKLIDYYKECIDSYPNYQIFNFKFAATETYNDISEFYKDVERQGYKIEWSYISEDDINQMDRDGQIYLFQIYNKDFAPNSKGMQNLHTLYLKNIFSEENLSDVVIKLNGEAELFFRKSSIQHKRGHKKGSVLVNKTYKTTEKTENGQGEIEVIESVPDQCYLELVKYWSEGGVGQLSEEASKYKDKVSHYAATMDIVKDRRYTEDKFFIHMPITINFKADNRNNVNEKVLKFIAENDDLHVIGIDRGERNLLYVSVIDSRGRIVEQKSFNIVENYESSKNVIRRHDYKGKLVNKEHYRNEARKSWKEIGKIKEIKEGYLSQVIHEISKLVLKYNAIIVMEDLNYGFKRGRFKVERQVYQKFETMLINKLAYLVDKSRAVDEPGGLLKGYQLTYVPDNLGELGSQCGIIFYVPAAYTSKIDPVTGFVDVFDFKAYSNAEARLDFINKLDCIRYDASRNKFEIAFDYGNFRTHHTTLAKTSWTIFIHGDRIKKERGSYGWKDEIIDIEARIRKLFEDTDIEYADGHNLIGDINELESPIQKKFVGELFDIIRFTVQLRNSKSEKYDGTEKEYDKIISPVMDEEGVFFTTDSYIRADGTELPKDADANGAYCIALKGLYDVLAVKKYWKEGEKFDRKLLAITNYNWFDFIQNRRF

SEQ ID NO: 127 - protein, 1305 aa, Lachnospira pectinoschiza strain 2789STDY5834886
MNKAADNYTGGNYDEFIALSKVQKTLRNELKPTPFTAEHIKQRGIISEDEYRAQQSLELKKIADEYYRNYITHKLNDINNLDFYNLFDAIEEKYKKNDKDNRDKLDLVEKSKRGEIAKMLSADDNFKSMFEAKLITKLLPDYVERNYTGEDKEKALETLALFKGFTTYFKGYFKTRKNMFSGEGGASSICHRIVNVNASIFYDNLKTFMRIQEKAGDEIALIEEELTEKLDGWRLEHIFSRDYYNEVLAQKGIDYYNQICGDINKHMNLYCQQNKFKANIFKMMKLQKQIMGISEKVFEIPPMYQNDEEVYASFNEFISRLEEVKLTDRLRNILQNINIYNTAKIYINARYYTNVSTYVYGGWGVIESAIERYLCNTIAGKGQSKVKKIENAKKDNKFMSVKELDSIVAEYEPDYFNAPYIDDDDNAVKVFGGQGVLGYFNKMSELLADVSLYTIDYNSDDSLIENKESALRIKKQLDDIMSLYHWLQTFIIDEVVEKDNAFYAELEDICCELENVVTLYDRIRNYVTRKPYSTQKFKLNFASPTLASGWSRSKEFDNNAIILLRNNKYYIAIFNVNNKPDKQIIKGSEEQRLSTDYKKMVYNLLPGPNKMLPKVFIKSDTGKRDYNPSSYILEGYEKNRHIKSSGNFDINYCHDLIDYYKACINKHPEWKNYGFKFKETNQYNDIGQFYKDVEKQGYSISWAYISEEDINKLDEEGKIYLFEIYNKDLSAHSTGRDNLHTMYLKNIFSEDNLKNICIELNGEAELFYRKSSMKSNITHKKDTILVNKTYINETGVRVSLSDEDYMKVYNYYNNNYVIDTENDKNLIDIIEKIGHRKSKIDIVKDKRYTEDKYFLYLPITINYGIEDENVNSKIIEYIAKQDNMNVIGIDRGERNLIYISVIDNKGNIIEQKSFNLVNNYDYKNKLKNMEKTRDNARKNWQEIGKIKDVKSGYLSGVISKIARMVIDYNAIIVMEDLNKGFKRGRFKVERQVYQKFENMLISKLNYLVFKERKADENGGILRGYQLTYIPKSIKNVGKQCGCIFYVPAAYTSKIDPATGFINIFDFKKYSGSGINAKVKDKKEFLMSMNSIRYINEGSEEYEKIGHRELFAFSFDYNNFKTYNVSSPVNEWTAYTYGERIKKLYKDGRWLRSEVLNLTENLIKLMEQYNIEYKDGHDIREDISHMDETRNADFICSLFEELKYTVQLRNSKSEAEDENYDRLVSPILNSSNGFYDSSDYMENENNTTHTMPKDADANGAYCIALKGLYEINKIKQNWSDDKKFKENELYINVTEWLDYIQNRRFE

SEQ ID NO: 128 - protein, 1262 aa, Bacteroidetes oral taxon 274 str. F0058
MRKFNEFVGLYPISKTLRFELKPIGKTLEHIQRNKLLEHDAVRADDYVKVKKIIDKYHKCLIDEALSGFTFDTEADGRSNNSLSEYYLYYNLKKRNEQEQKTFKTIQNNLRKQIVNKLTQSEKYKRIDKKELITTDLPDFLTNESEKELVEKFKNFTTYFTEFHKNRKNMYSKEEKSTAIAFRLINENLPKFVDNIAAFEKVVSSPLAEKINALYEDFKEYLNVEEISRVFRLDYYDELLTQKQIDLYNAIVGGRTEEDNKIQIKGLNQYINEYNQQQTDRSNRLPKLKPLYKQILSDRESVSWLPPKFDSDKNLLIKIKECYDALSEKEKVFDKLESILKSLSTYDLSKIYISNDSQLSYISQKMFGRWDIISKAIREDCAKRNPQKSRESLEKFAERIDKKLKTIDSISIGDVDECLAQLGETYVKRVEDYFVAMGESEIDDEQTDTTSFKKNIEGAYESVKELLNNADNITDNNLMQDKGNVEKIKTLLDAIKDLQRFIKPLLGKGDEADKDGVFYGEFTSLWTKLDQVTPLYNMVRNYLTSKPYSTKKIKLNFENSTLMDGWDLNKEPDNTTVIFCKDGLYYLGIMGKKYNRVFVDREDLPHDGECYDKMEYKLLPGANKMLPKVFFSETGIQRFLPSEELLGKYERGTHKKGAGFDLGDCRALIDFFKKSIERHDDWKKFDFKFSDTSTYQDISEFYREVEQQGYKMSFRKVSVDYIKSLVEEGKLYLFQIYNKDFSAHSKGTPNMHTLYWKMLFDEENLKDVVYKLNGEAEVFFRKSSITVQSPTHPANSPIKNKNKDNQKKESKFEYDLIKDRRYTVDKFLFHVPITMNFKSVGGSNINQLVKRHIRSATDLHIIGIDRGERHLLYLTVIDSRGNIKEQFSLNEIVNEYNGNTYRTDYHELLDTREGERTEARRNWQTIQNIRELKEGYLSQVIHKISELAIKYNAVIVLEDLNFGFMRSRQKVEKQVYQKFEKMLIDKLNYLVDKKKPVAETGGLLRAYQLTGEFESFKTLGKQSGILFYVPAWNTSKIDPVTGFVNLFDTHYENIEKAKVFFDKFKSIRYNSDKDWFEFVVDDYTRFSPKAEGTRRDWTICTQGKRIQICRNHQRNNEWEGQEIDLTKAFKEHFEAYGVDISKDLREQINTQNKKEFFEELLRLLRLTLQMRNSMPSSDIDYLISPVANDTGCFFDSRKQAELKENAVLPMNADANGAYNIARKGLLAIRKMKQEENDSAKISLAISNKEWLKFAQTKPYLED

SEQ ID NO: 129 - protein, 998 aa, Arcobacter butzleri L348 isolate CHRB125
MGLLEHLEGAIVEDMFSLDYFSLTLSQRYIDIYNTMIGGNTLADGTKVQGINENINIYRQKNNIDRKNLPTLKPLHKQLLSDRETLSWIPEAFKTKEEVVGAIEDFYKNNIISFKCCDNIVDITKQFIDIFSLNEDYELNKIFIKNDISITSISQDIFKDYRIIKEALWQKHINENPKAAKSKDLTGDKEKYFSRKNSFFSFEEIISSLKLMGRKIDLFSYFKDNVEYRAHSIETTFIKWQKNKNDKKTTKELLDNILNLQRVLKPLYLKAEVEKDILFYSIFDIYFESLNEIVKLYNKVRDFESKKPYSLEKFKLNFQNSTLLSGWDVNKEPDNTSILLKKDGLYYLGIMDKKHNRVFKNLESSKGGYEKIEYKLLSGPNKMLPKVFFSNKSIGYYNPSPALLEKYKSGVHKKGESFDLNFCHELIDFFKASIDKHEDWKNFNFKFSDTSEYADISGFYREVEQQGYKITFKNIDEEFINTLINEGKLYLFQIYNKDFSTFSKGTKNLHTLYWEMIFNEENLKNVVYKLNGEAEIFYRKKSIEYSEDKMKYGHHYEELKDKFNYPIIKDKRFTMDKFQFHVPITMNFKATGRSYINEEVNDFLRQNSKDVKIIGINRGERHLIYLTMINAKGEIIQQYSLNEIVNSYNNKNFTVNYNEKLSKKEGERAIARENWGVVENIKELKEGYLSHAIHTISNLIVENNAIVVLEDLNFEFKRERLKVEKSIYQKFEKMLIDKLNYLVDKKKDINENGGLLKALQLTNKFESFEKIGKQNGFLFFVNAWNITKICPVTGFVSLFDTRYQSVDKAREFFSKFDSIKYNEEKEHYEFVFDYSNFTDKAKDTKTKWTVCSYGTRIKTFRNSEKNNNWDNKTVSPTEDLSKLLKSCDRDIKEFIISQDKKEFFVELLEIFSLIVQMKNSIINSEIDYIISPVANENGEFFDSRFANSSLPKNADANAAYNTARKGLMLLEKIRDSEIGKKIDMKITNTEWLNFVQER

SEQ ID NO: 130 - protein, 1242 aa, Bacteroidales bacterium KA00251
MKKFTNLYPVQKTLRFELIPQGNTSKHLCKIIQEDEQIAEDSQEVKKLLDRYHKEFIAIALSSFPTSPLAKEIIPKLKEFAQIRATGDAKQISTIQDELRELVVKGFKGEGEQERRYKILIGAKGNPNADELFNTELINFLKDPAEQALVKKFQKHTGYFLGFNENRKNMYSAKAQSTAIAYRLIHENLPRFLDNITTYEKVKTYLKEEIPQLEKELVRAGASLVSHVDSVFTIDFFLEVFTQSGIDQYNALIGKIVNQEQGEVKGLNERINLYNQQHKQEAKLPLFKPLYKQILSDREQLSWLAEAYNSDKDLLDSIQKYYQLLIDNQIFERIPRLMHTLEKAPLDKIWITYDTQLTSISNTLYGSWRVIGEALGRNAKSEKERKSSQKKALNYSLESINQAIAKMPSDEELPPIQKYFIALGSNPSKKDASSGTLVDKVRSSYKACQDILTNPDHTGKKLIQDKKQVDLLKQLLDDLLILQRFIKPLLYSNNENETHKDEVFYTELTDIMDLLNPIVGLYNKVRNYLTQKPYSTEKFKINFKSSSLLAGWDRNKEKDNLGVILKREDKYYLAIMDKAHNATFKNKSLPTQGECYEKMEYKLLPGANKMLPKVYITSKKGIESFHPSEELQKKYKLGTHKKGASFNLSDMRALIDYFKESLEKHEEHSQFGFHFSDTSTYEDISGFYREVEQQAYKITFRKVSVEYIDQLVNEGKLYLFQIYNKDFSPYSKGTPNLHTLYWKMLFDPANLQDIVYKLNGEAEVFFRKKSLQYDRPTHPKGQPINKKSLLNEGETSLFDYDLIKDRRFTVDKFQFHVPITMNFKATQGTKVNQMVQEEVKKSKGFHLIGIDRGERNLLYIVVINERGEIIEQCSLNKIVNTYQEKEHTVDYKALLEKRSQSRLEERKSWQTIENIKELKGGYLSQVVHKIAQLMIKYNAIAVLEDLNFGFIRTRKKFEFSVYQEFEKKLIDKLGYVVDKKAPIQQEGGLLQAYQLTAPFKSFREMGKQNGFLFYVPAWNTSAIDPRTGFVNLLDTRYESIAKTKELIKKLKDIRYNSQKDWFEIDLDYNAFGNRAKGSRSKWRLCSYGERIEHTRKQDSNGQEESDSMVVLTEAFKDVFTKYQIDYRENLKEQLLLQSDKAFFVDFLSLLRLTLQLRNSLSNSLIDYILSPVADENGEFFDSRKALSNEPQDADANGAYHIALKGLWVLDKIRKTEKVTPAKLALSNQEWLSFAQEKPFFNE

SEQ ID NO: 131 - protein, 1302 aa, Acidaminococcus massiliensis strain Marseille-P2828
MAAFDKFIHQYQVSKTLRFALIPQGKTLENTKNNVLQEDDERQKNYEKVKPILDRIYKVFAEESLKDCSVDWNDLNACLDAYQKNPSADKRQKVKAAQDALRDEIAGYFTGKQYANGKNKNAVKEKEQAELYKDIFSKKIFDGTVTNNKLPQVNLSAEETELLGCFDKFTTYFVGFYQNRENVFSGEDIATAIPHRIVQDNFPKFRENCRIYQDLIKNEPALKPLLQQAAAAVMAQNPKGIYQPRKSLDDIFVIPFYNHLLLQDDIDYFNQILGGISGAAGQKKIQGLNETINLFMQQHPQEADKLKKKKIRHRFIPLYKQILSDRTSFSFIPEAFSNSQEALDGIETFKKSLKKNDTFGALERLIQNLASLDLKYVYLSNKKVNEISQALYGEWHCIQDVLKQDFSLESLIQINPQNSSNGFLATLTDEGKKRISQCRNVLGNPLPVKLADDQDKAQVKNQLDTLLAAVHYLEWFKADPDLETDPNFTVPFEKIWEELVPLLSLYSKVRNFVTKKPYSTAKFKLNFANPTLADGWDIHKESDNGALLFEKGGLYYLGIMNPKDKPNFKSYQGAEPYYQKMVYRFFPDCSKTIPKCSTQRKDVKKYFEDHPQATSYQIHDSKKEKFRQDFFEIPREIYELNNTTYGTGKSKYKKFQTQYYQKTQDKSGYQKALRKWIDFSKKFLQTYVSTSIFDFKGLRPSKDYQDLGEFYKDVNSRCYRVTFEKIRVQDIHEAVKNGQLYLFQLYNKDFSPKSHGLPNLHTLYWKAVFDPENLKDPIVKLNGQAELFYRPKSNMQIIQHKTGEEIVNKKLKDGTPVPDDIYREISAYVQGKCQGNLSPEAEKWLPSVTIKKAAHDITKDRRFTEDKFFFHVPITLNYQSSGKPTAFNSQVNDFLTEHPETNIIGIDRGERNLIYAVVITPDGKILEQKSFNVIHDFDYHESLSQREKQRVAARQAWTAIGRIKDLKEGYLSLVVHEIAQMMIKYQAVVVLENLNTGFKRVRGGISEKAVYQQFEKMLIEKLNFLVFKDRAINQEGGVLKAYQLTDSFTSFAKLGNQSGFLFYIPSAYTSKIDPGTGFVDPFIWSHVTASEENRNEFLKGFDSLKYDAQSSAFVLHFKMKSNKQFQKNNVEGFMPEWDICFEKNEEKISLQGSKYTAGKRIIFDSKKKQYMECFPQNELMKALQDVGITWNTGNDIWQDVLKQASTDTGFRHRMINLIRSVLQMRSSNGATGEDYINSPVMDLDGRFFDTRAGIRDLPLDADANGAYHIALKGRMVLERIRSQKNTAIKNTDWLYAIQEERN

SEQ ID NO: 132 - protein, 1310 aa, Helcococcus kunzii
MFEKLSNIVSISKTIRFKLIPVGKTLENIEKLGKLEKDFERSDFYPILKNISDDYYRQYIKEKLSDLNLDWQKLYDAHELLDSSKKESQKNLEMIQAQYRKVLFNILSGELDKSGEKNSKDLIKNNKALYGKLFKKQFILEVLPDFVNNNDSYSEEDLEGLNLYSKFTTRLKNFWETRKNVFTDKDIVTAIPFRAVNENFGFYYDNIKIFNKNIEYLENKIPNLENELKEADILDDNRSVKDYFTPNGFNYVITQDGIDVYQAIRGGFTKENGEKVQGINEILNLTQQQLRRKPETKNVKLGVLTKLRKQILEYSESTSFLIDQIEDDNDLVDRINKFNVSFFESTEVSPSLFEQIERLYNALKSIKKEEVYIDARNTQKFSQMLFGQWDVIRRGYTVKITEGSKEEKKKYKEYLELDETSKAKRYLNIREIEELVNLVEGFEEVDVFSVLLEKFKMNNIERSEFEAPIYGSPIKLEAIKEYLEKHLEEYHKWKLLLIGNDDLDTDETFYPLLNEVISDYYIIPLYNLTRNYLTRKHSDKDKIKVNFDFPTLADGWSESKISDNRSIILRKGGYYYLGILIDNKLLINKKNKSKKIYEILIYNQIPEFSKSIPNYPFTKKVKEHFKNNVSDFQLIDGYVSPLIITKEIYDIKKEKKYKKDFYKDNNTNKNYLYTIYKWIEFCKQFLYKYKGPNKESYKEMYDFSTLKDTSLYVNLNDFYADVNSCAYRVLFNKIDENTIDNAVEDGKLLLFQIYNKDFSPESKGKKNLHTLYWLSMFSEENLRTRKLKLNGQAEIFYRKKLEKKPIIHKEGSILLNKIDKEGNTIPENIYHECYRYLNKKIGREDLSDEAIALFNKDVLKYKEARFDIIKDRRYSESQFFFHVPITFNWDIKTNKNVNQIVQGMIKDGEIKHIIGIDRGERHLLYYSVIDLEGNIVEQGSLNTLEQNRFDNSTVKVDYQNKLRTREEDRDRARKNWTNINKIKELKDGYLSHVVHKLSRLIIKYEAIVIMENLNQGFKRGRFKVERQVYQKFELALMNKLSALSFKEKYDERKNLEPSGILNPIQACYPVDAYQELQGQNGIVFYLPAAYTSVIDPVTGFTNLFRLKSINSSKYEEFIKKFKNIYFDNEEEDFKFIFNYKDFAKANLVILNNIKSKDWKISTRGERISYNSKKKEYFYVQPTEFLINKLKELNIDYENIDIIPLIDNLEEKAKRKILKALFDTFKYSVQLRNYDFENDYIISPTADDNGNYYNSNEIDIDKTNLPNNGDANGAFNIARKGLLLKDRIVNSNESKVDLKIKNEDWINFIIS

SEQ ID NO: 133 - protein, 1263 aa, Agathobacter rectalis strain 2789STDY5834884
MNNGTNNFQNFIGISSLQKTLRNALTPTETTQQFIVKNGIIKEDELRGENRQILKDIMDDYYRGFISETLSSIDDIDWTSLFEKMEIQLKNGDNKDTLIKEQAEKRKAIYKKFADDDRFKNMFSAKLISDILPEFVIHNNNYSASEKEEKTQVIKLFSRFATSFKDYFKNRANCFSADDISSSSCHRIVNDNAEIFFSNALVYRRIVKNLSNDDINKISGDMKDSLKKMSLEKIYSYEKYGEFITQEGISFYNDICGKVNSFMNLYCQKNKENKNLYKLRKLHKQILCIADTSYEVPYKFESDEEVYQSVNGFLDNISSKHIVERLRKIGDNYNGYNLDKIYIVSKFYESVSQKTYRDWETINTALEIHYNNILPGNGKSKADKVKKAVKNDLQKSITEINELVSNYKLCPDDNIKAETYIHEISHILNNFEAQELKYNPEIHLVESELKASELKNVLDVIMNAFHWCSVFMTEELVDKDNNFYAELEEIYDEIYPVISLYNLVRNYVTQKPYSTKKIKLNFGIPTLADGWSKSKEYSNNAIILMRDNLYYLGIFNAKNKPEKKIIEGNTSENKGDYKKMIYNLLPGPNKMIPKVFLSSKTGVETYKPSAYILEGYKQNKHLKSSKDFDITFCRDLIDYFKNCIAIHPEWKNFGFDFSDTSTYEDISGFYREVELQGYKIDWTYISEKDIDLLQEKGQLYLFQIYNKDFSKKSTGNDNLHTMYLKNLFSEENLKDVVLKLNGEAEIFFRKSSIKNPIIHKKGSILVNRTYEAEEKDQFGNIQIVRKTIPENIYQELYKYFNDKSDKELSDEAAKLKNAVGHHEAATNIVKDYRYTYDKYFLHMPITINFKANKTSFINDRILQYIAKEKDLHVIGIDRGERNLIYVSVIDTCGNIVEQKSFNIVNGYDYQIKLKQQEGARQIARKEWKEIGKIKEIKEGYLSLVIHEISKMVIKYNAIIAMEDLSYGFKKGRFKVERQVYQKFETMLINKLNYLVFKDISITENGGLLKGYQLTYIPEKLKNVGHQCGCIFYVPAAYTSKIDPTTGFVNIFKFKDLTVDAKREFIKKFDSIRYDSDKNLFCFTFDYNNFITQNTVMSKSSWSVYTYGVRIKRRFVNGRFSNESDTIDITKDMEKTLEMTDINWRDGHDLRQDIIDYEIVQHIFEIFKLTVQMRNSLSELEDRNYDRLISPVLNENNIFYDSAKAGDALPKDADANGAYCIALKGLYEIKQITENWKEDGKFSRDKLKISNKDWFDFIQNKRYL

SEQ ID NO: 134 - protein, 1307 aa, Acidaminococcus sp. BV3L6
MTQFEGFTNLYQVSKTLRFELIPQGKTLKHIQEQGFIEEDKARNDHYKELKPIIDRIYKTYADQCLQLVQLDWENLSAAIDSYRKEKTEETRNALIEEQATYRNAIHDYFIGRTDNLTDAINKRHAEIYKGLFKAELFNGKVLKQLGTVTTTEHENALLRSFDKFTTYFSGFYENRKNVFSAEDISTAIPHRIVQDNFPKFKENCHIFTRLITAVPSLREHFENVKKAIGIFVSTSIEEVFSFPFYNQLLTQTQIDLYNQLLGGISREAGTEKIKGLNEVLNLAIQKNDETAHIIASLPHRFIPLFKQILSDRNTLSFILEEFKSDEEVIQSFCKYKTLLRNENVLETAEALFNELNSIDLTHIFISHKKLETISSALCDHWDTLRNALYERRISELTGKITKSAKEKVQRSLKHEDINLQEIISAAGKELSEAFKQKTSEILSHAHAALDQPLPTTLKKQEEKEILKSQLDSLLGLYHLLDWFAVDESNEVDPEFSARLTGIKLEMEPSLSFYNKARNYATKKPYSVEKFKLNFQMPTLASGWDVNKEKNNGAILFVKNGLYYLGIMPKQKGRYKALSFEPTEKTSEGFDKMYYDYFPDAAKMIPKCSTQLKAVTAHFQTHTTPILLSNNFIEPLEITKEIYDLNNPEKEPKKFQTAYAKKTGDQKGYREALCKWIDFTRDFLSKYTKTTSIDLSSLRPSSQYKDLGEYYAELNPLLYHISFQRIAEKEIMDAVETGKLYLFQIYNKDFAKGHHGKPNLHTLYWTGLFSPENLAKTSIKLNGQAELFYRPKSRMKRMAHRLGEKMLNKKLKDQKTPIPDTLYQELYDYVNHRLSHDLSDEARALLPNVITKEVSHEIIKDRRFTSDKFFFHVPITLNYQAANSPSKFNQRVNAYLKEHPETPIIGIDRGERNLIYITVIDSTGKILEQRSLNTIQQFDYQKKLDNREKERVAARQAWSVVGTIKDLKQGYLSQVIHEIVDLMIHYQAVVVLENLNFGFKSKRTGIAEKAVYQQFEKMLIDKLNCLVLKDYPAEKVGGVLNPYQLTDQFTSFAKMGTQSGFLFYVPAPYTSKIDPLTGFVDPFVWKTIKNHESRKHFLEGFDFLHYDVKTGDFILHFKMNRNLSFQRGLPGFMPAWDIVFEKNETQFDAKGTPFIAGKRIVPVIENHRFTGRYRDLYPANELIALLEEKGIVFRDGSNILPKLLENDDSHAIDTMVALIRSVLQMRNSNAATGEDYINSPVRDLNGVCFDSRFQNPEWPMDADANGAYHIALKGQLLLNHLKESKDLKLQNGISNQDWLAYIQELRN

SEQ ID NO: 135 - protein, 1246 aa, Lachnospiraceae bacterium ND2006
MLKNVGIDRLDVEKGRKNMSKLEKFTNCYSLSKTLRFKAIPVGKTQENIDNKRLLVEDEKRAEDYKGVKKLLDRYYLSFINDVLHSIKLKNLNNYISLFRKKTRTEKENKELENLEINLRKEIAKAFKGNEGYKSLFKKDIIETILPEFLDDKDEIALVNSFNGFTTAFTGFFDNRENMFSEEAKSTSIAFRCINENLTRYISNMDIFEKVDAIFDKHEVQEIKEKILNSDYDVEDFFEGEFFNFVLTQEGIDVYNAIIGGFVTESGEKIKGLNEYINLYNQKTKQKLPKFKPLYKQVLSDRESLSFYGEGYTSDEEVLEVFRNTLNKNSEIFSSIKKLEKLFKNFDEYSSAGIFVKNGPAISTISKDIFGEWNVIRDKWNAEYDDIHLKKKAVVTEKYEDDRRKSFKKIGSFSLEQLQEYADADLSVVEKLKEIIIQKVDEIYKVYGSSEKLFDADFVLEKSLKKNDAVVAIMKDLLDSVKSFENYIKAFFGEGKETNRDESFYGDFVLAYDILLKVDHIYDAIRNYVTQKPYSKDKFKLYFQNPQFMGGWDKDKETDYRATILRYGSKYYLAIMDKKYAKCLQKIDKDDVNGNYEKINYKLLPGPNKMLPKVFFSKKWMAYYNPSEDIQKIYKNGTFKKGDMFNLNDCHKLIDFFKDSISRYPKWSNAYDFNFSETEKYKDIAGFYREVEEQGYKVSFESASKKEVDKLVEEGKLYMFQIYNKDFSDKSHGTPNLHTMYFKLLFDENNHGQIRLSGGAELFMRRASLKKEELVVHPANSPIANKNPDNPKKTTTLSYDVYKDKRFSEDQYELHIPIAINKCPKNIFKINTEVRVLLKHDDNPYVIGIDRGERNLLYIVVVDGKGNIVEQYSLNEIINNFNGIRIKTDYHSLLDKKEKERFEARQNWTSIENIKELKAGYISQVVHKICELVEKYDAVIALEDLNSGFKNSRVKVEKQVYQKFEKMLIDKLNYMVDKKSNPCATGGALKGYQITNKFESFKSMSTQNGFIFYIPAWLTSKIDPSTGFVNLLKTKYTSIADSKKFISSFDRIMYVPEEDLFEFALDYKNFSRTDADYIKKWKLYSYGNRIRIFRNPKKNNVFDWEEVCLTSAYKELFNKYGINYQQGDIRALLCEQSDKAFYSSFMALMSLMLQMRNSITGRTDVDFLISPVKNSDGIFYDSRNYEAQENAILPKNADANGAYNIARKVLWAIGQFKKAEDEKLDKVKIAISNKEWLEYAQTSVKH

SEQ ID NO: 136 - protein, 1300 aa, Francisella tularensis subsp. novicida U112
MSIYQEFVNKYSLSKTLRFELIPQGKTLENIKARGLILDDEKRAKDYKKAKQIIDKYHQFFIEEILSSVCISEDLLQNYSDVYFKLKKSDDDNLQKDFKSAKDTIKKQISEYIKDSEKFKNLFNQNLIDAKKGQESDLILWLKQSKDNGIELFKANSDITDIDEALEIIKSFKGWTTYFKGFHENRKNVYSSNDIPTSIIYRIVDDNLPKFLENKAKYESLKDKAPEAINYEQIKKDLAEELTFDIDYKTSEVNQRVFSLDEVFEIANFNNYLNQSGITKFNTIIGGKFVNGENTKRKGINEYINLYSQQINDKTLKKYKMSVLFKQILSDTESKSFVIDKLEDDSDVVTTMQSFYEQIAAFKTVEEKSIKETLSLLFDDLKAQKLDLSKIYFKNDKSLTDLSQQVFDDYSVIGTAVLEYITQQIAPKNLDNPSKKEQELIAKKTEKAKYLSLETIKLALEEFNKHRDIDKQCRFEEILANFAAIPMIFDEIAQNKDNLAQISIKYQNQGKKDLLQASAEDDVKAIKDLLDQTNNLLHKLKIFHISQSEDKANILDKDEHFYLVFEECYFELANIVPLYNKIRNYITQKPYSDEKFKLNFENSTLANGWDKNKEPDNTAILFIKDDKYYLGVMNKKNNKIFDDKAIKENKGEGYKKIVYKLLPGANKMLPKVFFSAKSIKFYNPSEDILRIRNHSTHTKNGSPQKGYEKFEFNIEDCRKFIDFYKQSISKHPEWKDFGFRFSDTQRYNSIDEFYREVENQGYKLTFENISESYIDSVVNQGKLYLFQIYNKDFSAYSKGRPNLHTLYWKALFDERNLQDVVYKLNGEAELFYRKQSIPKKITHPAKEAIANKNKDNPKKESVFEYDLIKDKRFTEDKFFFHCPITINFKSSGANKFNDEINLLLKEKANDVHILSIDRGERHLAYYTLVDGKGNIIKQDTFNIIGNDRMKTNYHDKLAAIEKDRDSARKDWKKINNIKEMKEGYLSQVVHEIAKLVIEYNAIVVFEDLNFGFKRGRFKVEKQVYQKLEKMLIEKLNYLVFKDNEFDKTGGVLRAYQLTAPFETFKKMGKQTGIIYYVPAGFTSKICPVTGFVNQLYPKYESVSKSQEFFSKFDKICYNLDKGYFEFSFDYKNFGDKAAKGKWTIASFGSRLINFRNSDKNHNWDTREVYPTKELEKLLKDYSIEYGHGECIKAAICGESDKKFFAKLTSVLNTILQMRNSKTGTELDYLISPVADVNGNFFDSRQAPKNMPQDADANGAYHIGLKGLMLLGRIKNNQEGKKLNLVIKNEEYFEFVQNRNN

SEQ ID NO: 137 - protein, 1067 aa, Omnitrophica WOR_2 bacterium GWF2_38_59
MKNGINLFKTKTTKTKGVDMEKYQITKTIRFKLLPDNAHEIVEKVKSLKTSNVDELMDEVKNVHLKGLELLFALKKYFYFDGNQCKSFKSTLEIKARWLRLYTPDQYYLKKSSKNSYQLKSLSYFKDVFNDWLFNWEESVSELAIIYEKYKICQHQRDSRADIALLIKKLSMKEYFPFISDLIDCVNDKNSNKTFLMKLSEELSVLLEKCNSRALPYQSNGIVVGKASLNYYTVSKSEKMLQNEYEDVCQSLDKNYDITEMKVILYKEKLDNLNFKDVTIANAYNLLKENKALQKRLFSEYVSQGKVLSLIKTELPLFSNINDNDFEKYKEWSNEIKKLADKKNTFCKKTQQDKIKDIQNKISELKKKRGALFQYKFTSFQKHCDNYKKVAVQYGKLKARKKAIEKDEIEANLLRYWSVILEQEDKHSLVLIPKNNAKDAKQYIETINTKGGKYIIHHLDSLTLRALNKLCFNAVDIEKGQMVRENTFYQGIKEEFERNKINCDNQGVLKIQGLYSFKTEGGQINEKEAVEFFKEVLKSNYAREVLNLPYDLESNIFQKEYTNLDQFRQDLEKCCYALHSKIGKDDLDEFTRRFEAQVFDITSIDLKSKKEKTKTTGEMKKHTQLWLEFWKGAIEQNFATRVNPELSIFWRAPKSSREKKYGKGSDLYDPNKNNRYLYEQYTLALTITENAGSHFKDIAFKDTSKIKEAIKEFNMSLSQSKYCFGIDRGNAELVSLCLIKNEKDFPFEKFPVYRLRDLTYQGDFKDKHDQMRYGVAIKNISYFIDQEDLFEKNNLSAIDMTTAKLIKNKIVLNGDVLTYLKLKEETAKHKLTQFFQGSSINKNSRVYFDEDENVFKITTNRNHNPEEIIYFYRGEYGAIKNKNDLEDILNEYLCKMETGESEIVLLNRVNHLRDAISANIVGILSYLIDLFPETIVALENLAKGTIDRHVSQSYENITRRFEWALYRKLLNKQLAPPELKENILLREGDDKIDQFGIIHFVEEKNTSKDCPNCRKTTQQTNDNKFKEKKFVCKSCGFDTSKDRKGMDSLNSPDTVAAYNVARKKFES

SEQ ID NO: 138 - protein, 1057 aa, Candidatus Roizmanbacteria bacterium GW2011_GWA2_37_7 US54_C0016
MEIQELKNLYEVKKTVRFELKPSKKKIFEGGDVIKLQKDFEKVQKFFLDIFVYKNEHTKLEFKKKREIKYTWLRTNTKNEFYNWRGKSDTGKNYALNKIGFLAEEILRWLNEWQELTKSLKDLTQREEHKQERKSDIAFVLRNFLKRQNLPFIKDFFNAVIDIQGKQGKESDDKIRKFREEIKEIEKNLNACSREYLPTQSNGVLLYKASFSYYTLNKTPKEYEDLKKEKESELSSVLLKEIYRRKRFNRTTNQKDTLFECTSDWLVKIKLGKDIYEWTLDEAYQKMKIWKANQKSNFIEAVAGDKLTHQNFRKQFPLFDASDEDFETFYRLTKALDKNPENAKKIAQKRGKFFNAPNETVQTKNYHELCELYKRIAVKRGKIIAEIKGIENEEVQSQLLTHWAVIAEERDKKFIVLIPRKNGGKLENHKNAHAFLQEKDRKEPNDIKVYHFKSLTLRSLEKLCFKEAKNTFAPEIKKETNPKIWFPTYKQEWNSTPERLIKFYKQVLQSNYAQTYLDLVDFGNLNTFLETHFTTLEEFESDLEKTCYTKVPVYFAKKELETFADEFEAEVFEITTRSISTESKRKENAHAEIWRDFWSRENEEENHITRLNPEVSVLYRDEIKEKSNTSRKNRKSNANNRFSDPRFTLATTITLNADKKKSNLAFKTVEDINIHIDNFNKKFSKNFSGEWVYGIDRGLKELATLNVVKFSDVKNVFGVSQPKEFAKIPIYKLRDEKAILKDENGLSLKNAKGEARKVIDNISDVLEEGKEPDSTLFEKREVSSIDLTRAKLIKGHIISNGDQKTYLKLKETSAKRRIFELFSTAKIDKSSQFHVRKTIELSGTKIYWLCEWQRQDSWRTEKVSLRNTLKGYLQNLDLKNRFENIETIEKINHLRDAITANMVGILSHLQNKLEMQGVIALENLDTVREQSNKKMIDEHFEQSNEHVSRRLEWALYCKFANTGEVPPQIKESIFLRDEFKVCQIGILNFIDVKGTSSNCPNCDQESRKTGSHFICNFQNNCIFSSKENRNLLEQNLHNSDDVAAFNIAKRGLEIVKV

SEQ ID NO: 139 - RNA, 78 nt, Uncultured Clostridium sp. isolate 2789STDY5608795
cagucuuaauaaacgaaaaagaauauauuacuuaaccagaugugugcaaaugugauaaaaagaauaaguuuaaauaag

SEQ ID NO: 140 - RNA, 67 nt, Uncultured bacterium (gcode 4) ACD_3C00058, whole genome shotgun sequence
agagaaaaaugcaaaccuaagucuuaauuuuuucaccuuccuacagauaagccaaaagucguaauuu

SEQ ID NO: 141 - RNA, 81 nt, Thiomicrospira sp. XS5 ZB100000
uucucugauaaaauaauuaacucaggucuuuucgagaaaaaacugcaaaccuuggucuuaaugagaaaaaucaugaaaaaa

SEQ ID NO: 142 - RNA, 82 nt, Flavobacterium branchiophilum FL-15
caugaaaacaagcuuucgaaugcuguuuuuuuauuuaaaagcaaccaaaaacgguaaaaaaggguuguuuuugugucauuuu

SEQ ID NO: 143 - RNA, 63 nt, Moraxella bovoculi strain 57922
gucuaacgaccuuuuaaauuucuacuguuuguagauauucgugcguauuugauuucuuugugu

SEQ ID NO: 144 - RNA, 85 nt, Candidatus Roizmanbacteria bacterium GW2011_GWA2_37_7 US54_C0016
aauggaaaaaguggaaauuguauuaucaguacaaaaccuaagucuuuauuuuuuugaagacgauguagaguuguagucuaaugag

SEQ ID NO: 145 - RNA, 84 nt, Pseudobutyrivibrio xylanivorans
accuauaacuuaauuuguggauacuaagucuugagugaugaaaauggcaguuuuguuaguaaauaaacauaauaauaugaugaa

SEQ ID NO: 146 - RNA, 83 nt, Prevotella bryantii B14
auauacgauauuauguuuuagccuacauuuucauaaaguucugauaucaaacacauuauaaacuuuuauauaacaaucaagaa

SEQ ID NO: 147 - RNA, 63 nt, Smithella sp. SCADC
uuaugguguuucagcaauuuaaucuugcgcgugaaagaaaaaugugcuuauuaaacaacuaua

SEQ ID NO: 148 - RNA, 57 nt, Smithella sp. SCADC
aaaaauuggcugauuuuaugguguuucagcaauuuaaucuugcgcgugaaagaaaaa

SEQ ID NO: 149 - RNA, 82 nt, Bacteroidetes bacterium GWF2_33_38
gcacaaagaagcaaagcuuuuuuaaaaagcuuugcuucuaaaacaauuaguuauuugaaauaguuguauuuuuuuuuuacga

SEQ ID NO: 150 - RNA, 74 nt, Candidatus Peribacteria bacterium RIFCSPLOWO2
aaauccauauguggauaucucaucuugcagaccaucguccuuauuuucuuaagaagaccucuucaaaccaaaaa

SEQ ID NO: 151 - RNA, 74 nt, Nitrospinae bacterium RIFCSPLOWO2
uucuacuauuguagaucaaaccucggucuuaauguaaaaaauggcgcuuggacuggcggucaaaaccacaaaaa

SEQ ID NO: 152 - RNA, 67 nt, Candidatus Ryanbacteria bacterium RIFCSPHIGHO2
cucgugaaagguggaaauccagugaagguauuugguuuaauauguauauuacgagauaugcgggaaa

SEQ ID NO: 153 - RNA, 85 nt, Candidatus Wildermuthbacteria bacterium RIFCSPHIGHO2
uuauacugaagcauaaaguauaaauugcguguggauauuaauuuagacucaauauauaacgguggaaaaccuuugccuuuauaaa

SEQ ID NO: 154 - RNA, 59 nt, Firmicutes bacterium CAG_194_44_15
gucuuucuauuuaguuuuaauuuuagguuacuugacaauaugguaauaauaaacaaaau

SEQ ID NO: 155 - RNA, 83 nt, Candidatus Gottesmanbacteria bacterium CG1_02_37_22
auuauaaaagcagaagugaaacuguuaauauuugagaaaacuuaagucuuuaugagccuguuucuugcuauuuuacgccuaaa

SEQ ID NO: 156 - RNA, 87 nt, Candidatus Gracilibacteria bacterium CG1_02_38_174
aacaaggguggaaaucuuuauguuggguuuuacgaaaacugcaaaccucagucuucauuuuuugcgaguaccguuuuaagccaagaa

SEQ ID NO: 157 - RNA, 76 nt, Butyrivibrio fibrisolvens MD2001
aaccuccgauuugauuuuuauuuauggguucuuggaaauaauauaugggcaaauuauuggugauaaguuauaaaaa

SEQ ID NO: 158 - RNA, 60 nt, Sneathia amnii strain SN35
aaucaagguguuaauauuuuuaaaaugcgaaaaaaucaaaucucucaaauguaaaaaaaa

SEQ ID NO: 159 - RNA, 73 nt, Coprococcus eutactus strain 2789STDY5608843
cagucuuucugaggaaaaauuaagggguuacucaacagauaugaacauaacaaacaaaaaaagaauguauaua

SEQ ID NO: 160 - RNA, 65 nt, Lachnospira pectinoschiza strain 2789STDY5834886
ugaccuuaauauuuaaaauuagauggguuacuuaauauaauauguguauauugcauaaaaaauaa

SEQ ID NO: 161 - RNA, 80 nt, Bacteroidetes oral taxon 274 str. F0058
auggagaauacaaaguuugauuauugucuugauaauaaauaaacuaugaaaauuuguuuuuugcagggggggauaaaaua

SEQ ID NO: 162 - RNA, 63 nt, Arcobacter butzleri L348 isolate CHRB125
uauggaaauauuguuaaaaaauauaaauuuuaagaggguaaauaagcuuuuuuaauaugauuu

SEQ ID NO: 163 - RNA, 65 nt, Bacteroidales bacterium KA00251
acucccuauuauucaacuaaaaaaggccauuuuccccgaucauuuagaagagagagggggggaaa

SEQ ID NO: 164 - RNA, 67 nt, Acidaminococcus massiliensis strain Marseille-P2828
agugaaaaucguggaaaaucacuugguacaauggacgggaacacuauauauuguggcagacuccaag

SEQ ID NO: 165 - RNA, 71 nt, Helcococcus kunzii
uucuuaaaggauaucuaaaaauguauucauuaaaugagaguuuaugcauugcaauacuaacuauagugaca

SEQ ID NO: 166 - RNA, 57 nt, Agathobacter rectalis strain 2789STDY5834884
uggaccuuaauuuuauaauaaucuauauuacuuaacauauuuugugcaaauguuaua

SEQ ID NO: 167 - RNA, 72 nt, Acidaminococcus sp. BV3L6; identical to SEQ ID NO: 6

SEQ ID NO: 168 - RNA, 65 nt, Lachnospiraceae bacterium ND2006; identical to SEQ ID NO: 3

SEQ ID NO: 169 - RNA, 81 nt, Francisella tularensis subsp. novicida U112
aaguucuuagagauauuuaaaaauaugacuguuguuauauaucaaaaugcuaaaaaaaucauagauuuuaggucuuuuuuu

SEQ ID NO: 170 - RNA, 72 nt, Omnitrophica WOR_2 bacterium GWF2_38_59
gccuuuauuuauuggacuuacgaaaauacucuuaaaaacuaugaugcuguaaauuguugggguaucguuugu

SEQ ID NO: 171 - RNA, 69 nt, Candidatus Roizmanbacteria bacterium GW2011_GWA2_37_7 US54_C0016
auggaaaaaguggaaauuguauuaucaguacaaaaccuaagucuuuauuuuuuugaagacgauguagag

SEQ ID NO: 172 - protein, 1300 aa, Francisella tularensis
MSIYQEFVNKYSLSKTLRFELIPQGKTLENIKARGLILDDEKRAKDYKKAKQIIDKYHQFFIEEILSSVCISEDLLQNYSDVYFKLKKSDDDNLQKDFKSAKDTIKKQISEYIKDSEKFKNLFNQNLIDAKKGQESDLILWLKQSKDNGIELFKANSDITDIDEALEIIKSFKGWTTYFKGFHENRKNVYSSDDIPTSIIYRIVDDNLPKFLENKAKYESLKDKAPEAINYEQIKKDLAEELTFDIDYKTSEVNQRVFSLDEVFEIANFNNYLNQSGITKFNTIIGGKFVNGENTKRKGINEYINLYSQQINDKTLKKYKMSVLFKQILSDTESKSFVIDKLEDDSDVVTTMQSFYEQIAAFKTVEEKSIKETLSLLFDDLKAQKLDLSKIYFKNDKSLTDLSQQVFDDYSVIGTAVLEYITQQVAPKNLDNPSKKEQDLIAKKTEKAKYLSLETIKLALEEFNKHRDIDKQCRFEEILANFAAIPMIFDEIAQNKDNLAQISLKYQNQGKKDLLQASAEEDVKAIKDLLDQTNNLLHRLKIFHISQSEDKANILDKDEHFYLVFEECYFELANIVPLYNKIRNYITQKPYSDEKFKLNFENSTLANGWDKNKEPDNTAILFIKDDKYYLGVMNKKNNKIFDDKAIKENKGEGYKKIVYKLLPGANKMLPKVFFSAKSIKFYNPSEDILRIRNHSTHTKNGNPQKGYEKFEFNIEDCRKFIDFYKESISKHPEWKDFGFRFSDTQRYNSIDEFYREVENQGYKLTFENISESYIDSVVNQGKLYLFQIYNKDFSAYSKGRPNLHTLYWKALFDERNLQDVVYKLNGEAELFYRKQSIPKKITHPAKEAIANKNKDNPKKESVFEYDLIKDKRFTEDKFFFHCPITINFKSSGANKFNDEINLLLKEKANDVHILSIDRGERHLAYYTLVDGKGNIIKQDTFNIIGNDRMKTNYHDKLAAIEKDRDSARKDWKKINNIKEMKEGYLSQVVHEIAKLVIEHNAIVVFEDLNFGFKRGRFKVEKQVYQKLEKMLIEKLNYLVFKDNEFDKTGGVLRAYQLTAPFETFKKMGKQTGIIYYVPAGFTSKICPVTGFVNQLYPKYESVSKSQEFFSKFDKICYNLDKGYFEFSFDYKNFGDKAAKGKWTIASFGSRLINFRNSDKNHNWDTREVYPTKELEKLLKDYSIEYGHGECIKAAICGESDKKFFAKLTSVLNTILQMRNSKTGTELDYLISPVADVNGNFFDSRQAPKNMPQDADANGAYHIGLKGLMLLDRIKNNQEGKKLNLVIKNEEYFEFVQNRNN

SEQ ID NO: 173 - DNA, 36 bp, Lachnospiraceae bacterium ND2006
gtttcaaagattaaataatttctactaagtgtagat

SEQ ID NO: 174 - DNA, 28 bp, Lachnospiraceae bacterium ND2006
cggtctcgcaaagaatggatatactcat

SEQ ID NO: 175 - DNA, 49 bp, Lachnospiraceae bacterium ND2006
taatttctactaagtgtagatcggtctcgcaaagaatggatatactcat

SEQ ID NO: 176 - DNA, 35 bp, Acidaminococcus sp. BV3L6
gtcaaaagacctttttaatttctactcttgtagat

SEQ ID NO: 177 - DNA, 26 bp, Acidaminococcus sp. BV3L6
gtctaaactggtcgaaatcgaccagt

SEQ ID NO: 178 - DNA, 46 bp, Acidaminococcus sp. BV3L6
taatttctactcttgtagatgtctaaactggtcgaaatcgaccagt

SEQ ID NO: 179 - RNA, 41 nt, Artificial sequence
  Synthetic construct
uaauuucuacucuuguagauuggacagagcuccaagugacc

SEQ ID NO: 180 - RNA, 19 nt, Artificial sequence
  Synthetic construct
uaauuucuacucuuguaga

SEQ ID NO: 181 - RNA, 21 nt, Artificial sequence
  Synthetic construct
uggacagagcuccaagugacc

SEQ ID NO: 182 - protein, 1259 aa, Artificial sequence
  Synthetic construct
GPAGSGGPKKKRKVGGSGMSKLEKFTNCYSLSKTLRFKAIPVGKTQENIDNKRLLVEDEKRAEDYKGVKKLLDRYYLSFINDVLHSIKLKNLNNYISLFRKKTRTEKENKELENLEINLRKEIAKAFKGNEGYKSLFKKDIIETILPEFLDDKDEIALVNSFNGFTTAFTGFFDNRENMFSEEAKSTSIAFRCINENLTRYISNMDIFEKVDAIFDKHEVQEIKEKILNSDYDVEDFFEGEFFNFVLTQEGIDVYNAIIGGFVTESGEKIKGLNEYINLYNQKTKQKLPKFKPLYKQVLSDRESLSFYGEGYTSDEEVLEVFRNTLNKNSEIFSSIKKLEKLFKNFDEYSSAGIFVKNGPAISTISKDIFGEWNVIRDKWNAEYDDIHLKKKAVVTEKYEDDRRKSFKKIGSFSLEQLQEYADADLSVVEKLKEIIIQKVDEIYKVYGSSEKLFDADFVLEKSLKKNDAVVAIMKDLLDSVKSFENYIKAFFGEGKETNRDESFYGDFVLAYDILLKVDHIYDAIRNYVTQKPYSKDKFKLYFQNPQFMGGWDKDKETDYRATILRYGSKYYLAIMDKKYAKCLQKIDKDDVNGNYEKINYKLLPGPNKMLPKVFFSKKWMAYYNPSEDIQKIYKNGTFKKGDMFNLNDCHKLIDFFKDSISRYPKWSNAYDFNFSETEKYKDIAGFYREVEEQGYKVSFESASKKEVDKLVEEGKLYMFQIYNKDFSDKSHGTPNLHTMYFKLLFDENNHGQIRLSGGAELFMRRASLKKEELVVHPANSPIANKNPDNPKKTTTLSYDVYKDKRFSEDQYELHIPIAINKCPKNIFKINTEVRVLLKHDDNPYVIGIDRGERNLLYIVVVDGKGNIVEQYSLNEIINNFNGIRIKTDYHSLLDKKEKERFEARQNWTSIENIKELKAGYISQVVHKICELVEKYDAVIALEDLNSGFKNSRVKVEKQVYQKFEKMLIDKLNYMVDKKSNPCATGGALKGYQITNKFESFKSMSTQNGFIFYIPAWLTSKIDPSTGFVNLLKTKYTSIADSKKFISSFDRIMYVPEEDLFEFALDYKNFSRTDADYIKKWKLYSYGNRIRIFRNPKKNNVFDWEEVCLTSAYKELFNKYGINYQQGDIRALLCEQSDKAFYSSFMALMSLMLQMRNSITGRTDVDFLISPVKNSDGIFYDSRNYEAQENAILPKNADANGAYNIARKVLWAIGQFKKAEDEKLDKVKIAISNKEWLEYAQTSVKHGGSGPKKKRKVGG

SEQ ID NO: 183 - DNA, 5 bp, Artificial sequence
  Synthetic construct
ggtga

SEQ ID NO: 184 - DNA, 5 bp, Artificial sequence
  Synthetic construct
ggtga

SEQ ID NO: 185 - DNA, 6 bp, Artificial sequence
  Synthetic construct
  misc_feature (4)..(4): R is A or G
tccrac

SEQ ID NO: 186 - DNA, 5 bp, Artificial sequence
  Synthetic construct
  misc_feature (3)..(3): S is G or C
ttsaa

SEQ ID NO: 187 - DNA, 11 bp, Artificial sequence
  Synthetic construct
  misc_feature (3)..(9): N is A, C, G, or T
gcnnnnnnngc

SEQ ID NO: 188 - DNA, 4 bp, Artificial sequence
  Synthetic construct
gcgc

SEQ ID NO: 189 - DNA, 4 bp, Artificial sequence
  Synthetic construct
gcgc

SEQ ID NO: 190 - DNA, 4 bp, Artificial sequence
  Synthetic construct
gcgc

SEQ ID NO: 191 - DNA, 6 bp, Artificial sequence
  Synthetic construct
  misc_feature (2)..(2): R is A or G
  misc_feature (5)..(5): Y is C or T
grcgyc

SEQ ID NO: 192 - DNA, 6 bp, Artificial sequence
  Synthetic construct
  misc_feature (1)..(1): R is A or G
  misc_feature (6)..(6): Y is C or T
rgcgcy

SEQ ID NO: 193 - DNA, 6 bp, Artificial sequence
  Synthetic construct
  misc_feature (3)..(4): N is A, C, G, or T
ggnncc

SEQ ID NO: 194 - DNA, 6 bp, Artificial sequence
  Synthetic construct
ggcgcc

SEQ ID NO: 195 - DNA, 6 bp, Artificial sequence
  Synthetic construct
ggcgcc

SEQ ID NO: 196 - DNA, 6 bp, Artificial sequence
  Synthetic construct
ggcgcc

SEQ ID NO: 197 - DNA, 6 bp, Artificial sequence
  Synthetic construct
ggcgcc

SEQ ID NO: 198 - DNA, 6 bp, Artificial sequence
  Synthetic construct
  misc_feature (3)..(3): Y is C or T
  misc_feature (4)..(4): R is A or G
ggyrcc

SEQ ID NO: 199 - DNA, 6 bp, Artificial sequence
  Synthetic construct
atgcat

SEQ ID NO: 200 - DNA, 6 bp, Artificial sequence
  Synthetic construct
gaatgc

SEQ ID NO: 201 - DNA, 10 bp, Artificial sequence
  Synthetic construct
  misc_feature (3)..(3): Y is C or T
  misc_feature (4)..(7): N is A, C, G, or T
  misc_feature (8)..(8): R is A or G
caynnnnrtg

SEQ ID NO: 202 - DNA, 5 bp, Artificial sequence
  Synthetic construct
atgaa

SEQ ID NO: 203 - DNA, 6 bp, Artificial sequence
  Synthetic construct
catatg

SEQ ID NO: 204 - protein, 1267 aa, Butyrivibrio hungatei
MLYDEYSTQYYKGDEKRPMLNYEEFTKRNHITKALRMELIPQGKTQNVIDEKGDRKYDAALYSSLERLKPVIDSFIRSTASRALSDVDYDFNAMHDAYINKDKKSWAKEEKALKKVLMKAVDEALPKGLKCSQINSAAFLQEVLREYVLHATDTELRKDVALKDIEETKGCLALFSKFLTTRITALTVWMPERVIENFKIYCSNIPRIEAIFNEAKDIANNYSDELELMKTAQYYTKILSQDAIDGYNLVIAGKITENGIETKGLNVLINEYNIDVKNQKLDKPYLRKINQLYKQTLFSSEKQFVITAIKTDDEVRRVIKSAWESFDGAATKMLGLFKETLEATNGNGVCVKGNRLHILSHALLGEHKAITDNLVKAELVEIHEMLKNEALKPSMRAELEKRVDIAQSLVVKKDYSFTALDEAVTSIDENVIGLSKGAFNLYVAKTEELIKEAKMYYKVLEGGDIFKKRHIKGDKHVQEMLVDFFDALTEVRNIISVISMPDENEDADVSFYNRFDEIYENIRLTYKAENLVRNYITKSVKDTAEEKQTCFGTPARLRTQWWNGEQKFAKNHAAIIKHDGKYYYFILAGDSKPIEIKEDGNSATGLLTLKKGQKSFMMLPKILFTDHAVPFFEGNKDAMEYTLDDESVIRPVKVGRMLYEIYKKGLFKREAVTSGAITEEEYAKNIQALIEKYTEFANAYVQYQKFNLDDINDPTRYSDIGEFFSEVDTCTSRLSWTYIDYAQIANLVDSGSAYLFLISTKFLYTESEDKNAYTKTFRSILSDANMDKTTILLNSNPAVFFRPQSIKKEITHKAGSIMVNKLTEDGEHIPKKIYEAIYKSKNEMSGVSEEDMAAANEYMRTHKVRSFKAKYDKTYRGNYMSDKYTLQLTYTKNNDVSDRVNDMLNDRVIEAMQDGFNIVSVARSTKDMVYALVLDSSLKIIKELSLNVIDGVDYYALLHDTYLEKKENKKLWIYDTENTELKSAYIDLAISEILKLAREYNAVIAVESISDAVKNKYSFIDNQVFKAFENRIAQRLSDLTYKDVVDGRPGSVSNPLQLSNNNGNTYQDGILFFINGAYTRGIDPSSGFTSLFDFSRYNSIASKRQFFSKMAKISYTGDSIVFDFDYVDYPVHVDTEKTKWQVKLSGDVVVYDREKKQNKRIKDVVNEIIIPLAGKTDLNGNIAENILNKDVPGAFVEELFRWFRYAVTGIHAQVKGKDEFYKSPVDGNEYNISNMLAFNLAKKLVFRLEYAGESKDFTKEWLNYMQA

SEQ ID NO: 205 - protein, 1247 aa, Butyrivibrio hungatei
MKFTDFTGLYSLSKTLRFELKPIGKTLENIKKAGLLEQDQHRADSYKKVKKIIDEYHKAFIEKSLSNFELKYQSEDKLDSLEEYLMYYSMKRIEKTEKDKFAKIQDNLRKQIADHLKGDESYKTIFSKDLIRKNLPDFVKSDEERTLIKEFKDFTTYFKGFYENRENMYSAEDKSTAISHRIIHENLPKFVDNINAFSKIILIPELREKLNQIYQDFEEYLNVESIDEIFHLDYFSMVMTQKQIEVYNAIIGGKSTNDKKIQGLNEYINLYNQKHKDCKLPKLKLLFKQILSDRIAISWLPDNFKDDQEALDSIDTCYKNLLNDGNVLGEGNLKLLLENIDTYNLEGIFIRNDLQLTDISQKMYASWNVIQDAVILDLKKQVSRKKKESAEDYNDRLKKLYTSQESFSIQYLNDCLRAYGKTENIQDYFAKLGAVNNEHEQTINLFAQVKNAYTSVQAILTTPYPENANLAQDKETVALIKNLLDSLKRLQRFIKPLLGKGDESDKDERFYGDFTPLWETLNQITPLYNMVRNYMTRKPYSQEKIKLNFENSTLLGGWDLNKEHDNTAIILRKNGLYYLAIMKKSANKIFDKDKLDNSGDCYEKMVYKLLPGANKMLPKVFFSKSRIDEFKPSENIIENYKKGTHKKGANFNLADCHNLIDFFKSSISKHEDWSKFNFHFSDTSSYEDLSDFYREVEQQGYSISFCDVSVEYINKMVEKGDLYLFQIYNKDFSEFSKGTPNMHTLYWNSLFSKENLNNIIYKLNGQAEIFFRKKSLNYKRPTHPAHQAIKNKNKCNEKKESIFDYDLVKDKRYTVDKFQFHVPITMNFKSTGNTNINQQVVDYLRTEDDTHIIGIDRGERHLLYLVVIDSHGKIVEQFTLNEIVNEYGGNIYRTNYHDLLDTREQNREKARESWQTIENIKELKEGYISQVIHKITDLMQKYHAVVVLEDLNMGFMRGRQKVEKQVYQKFEEMLINKLNYLVNKKADQNSAGGLLHAYQLTSKFESFQKLGKQSGFLFYIPAWNTSKIDPVTGFVNLFDTRYESIDKAKAFFGKFDSIRYNADKDWFEFAFDYNNFTTKAEGTRTNWTICTYGSRIRTFRNQAKNSQWDNEEIDLTKAYKAFFAKHGINIYDNIKEAIAMETEKSFFEDLLHLLKLTLQMRNSITGTTTDYLISPVHDSKGNFYDSRICDNSLPANADANGAYNIARKGLMLIQQIKDSTSSDRFKFSPITNKDWLVFAQEKPYLND

SEQ ID NO: 206 - protein, 973 aa, Butyrivibrio hungatei
MTEEDTKSFVDEILLTPESVIKTIDNFIDSIIMNDIEGLKEEFLKISLENFEGIYISNKKLNEISNRKFGDYNSINMMIKQSMNEKGILSKKEINELIPDLENINKPKVKSFNLSFIFENLTKEHKELIIDYIRENICNVIENVKITIEKYRNIDNKIEFKNNAEKVSKIKEMLESINELCKLIKEFNTDEIEKNNEFYNILNKNFEIFESSYKVLNKVRNFVTKKEVIENKMKLNFSNYQLGNGWHKNKEKDCSIILFRKRNNERWIYYLGILKHGTKIKENDYLSSVDTGFYKMDYYAQNSLSKMIPKCSITVKNVKNAPEDESVILNDSKKFNEPLEITPEIRKLYGNNEHIKGDKFKKESLVKWIDFCKEFLLKYKSFEKAKKEILKLKESNLYENLEEFYSDAEEKAYFLEFINIDEDKIKKLVKEKNLYLFQIYNKDFSAYSTGNKNLHTMYFEELFTDENLKKPVFKLNGNTEVFYRIASSKPKIVHNKGEKLVNKTYLDDGIIKTIPDSVYEEISEKVKNNEDYSKLLEENNIKNLEIKVATHEIVKDKRYFENKFLFYLPITLNKKVSNKNTNKNINKNVIDEIKDCNEYNVIGIDRGERNLISLCIINQNGEIILQKEMNIIQSSDKYNVDYNEKLEIKSKERDNAKKNWSEIGKIKDLKSGYLSAVVHEIVKLAIEYNAVIILEDLNNGFKNSRKKVDKQIYQKFERALIEKLQFLIFKNYDKNEKGGLRNAFQLTPELKNITKVASQQGIIIYTNPAYTSKIDPTTGYANIIKKSNNNEESIVKAIDKISYDKEKDMFYFDINLSNSSFNLTVKNVLKKEWRIYTNGERIIYKDRKYITLNITQEMKDILSKCGIDYLNIDNLKQDILKNKLHKKVYYIFELANKMRNENKDVDYIISPVLNKDGKFFMTQEINELTPKDADLNGAYNIALKGKLMIDNLNKKEKFVFLSNEDWLNFIQGR

SEQ ID NO: 207 - protein, 1300 aa, Butyrivibrio hungatei; identical to SEQ ID NO: 136

SEQ ID NO: 208 - protein, 1282 aa, Eubacterium eligens
MNGNRSIVYREFVGVIPVAKTLRNELRPVGHTQEHIIQNGLIQEDELRQEKSTELKNIMDDYYREYIDKSLSGVTDLDFTLLFELMNLVQSSPSKDNKKALEKEQSKMREQICTHLQSDSNYKNIFNAKLLKEILPDFIKNYNQYDVKDKAGKLETLALFNGFSTYFTDFFEKRKNVFTKEAVSTSIAYRIVHENSLIFLANMTSYKKISEKALDEIEVIEKNNQDKMGDWELNQIFNPDFYNMVLIQSGIDFYNEICGVVNAHMNLYCQQTKNNYNLFKMRKLHKQILAYTSTSFEVPKMFEDDMSVYNAVNAFIDETEKGNIIGKLKDIVNKYDELDEKRIYISKDFYETLSCFMSGNWNLITGCVENFYDENIHAKGKSKEEKVKKAVKEDKYKSINDVNDLVEKYIDEKERNEFKNSNAKQYIREISNIITDTETAHLEYDDHISLIESEEKADEMKKRLDMYMNMYHWAKAFIVDEVLDRDEMFYSDIDDIYNILENIVPLYNRVRNYVTQKPYNSKKIKLNFQSPTLANGWSQSKEFDNNAIILIRDNKYYLAIFNAKNKPDKKIIQGNSDKKNDNDYKKMVYNLLPGANKMLPKVFLSKKGIETFKPSDYIISGYNAHKHIKTSENFDISFCRDLIDYFKNSIEKHAEWRKYEFKFSATDSYSDISEFYREVEMQGYRIDWTYISEADINKLDEEGKIYLFQIYNKDFAENSTGKENLHTMYFKNIFSEENLKDIIIKLNGQAELFYRRASVKNPVKHKKDSVLVNKTYKNQLDNGDVVRIPIPDDIYNEIYKMYNGYIKESDLSEAAKEYLDKVEVRTAQKDIVKDYRYTVDKYFIHTPITINYKVTARNNVNDMVVKYIAQNDDIHVIGIDRGERNLIYISVIDSHGNIVKQKSYNILNNYDYKKKLVEKEKTREYARKNWKSIGNIKELKEGYISGVVHEIAMLIVEYNAIIAMEDLNYGFKRGRFKVERQVYQKFESMLINKLNYFASKEKSVDEPGGLLKGYQLTYVPDNIKNLGKQCGVIFYVPAAFTSKIDPSTGFISAFNFKSISTNASRKQFFMQFDEIRYCAEKDMFSFGFDYNNFDTYNITMGKTQWTVYTNGERLQSEFNNARRTGKTKSINLTETIKLLLEDNEINYADGHDIRIDMEKMDEDKKSEFFAQLLSLYKLTVQMRNSYTEAEEQENGISYDKIISPVINDEGEFFDSDNYKESDDKECKMPKDADANGAYCIALKGLYEVLKIKSEWTEDGFDRNCLKLPHAEWLDFIQNKRYE

SEQ ID NO: 209 - protein, 1238 aa, Unknown
  Candidatus Methanoplasma termitum strain MpT1
MNNYDEFTKLYPIQKTIRFELKPQGRTMEHLETFNFFEEDRDRAEKYKILKEAIDEYHKKFIDEHLTNMSLDWNSLKQISEKYYKSREEKDKKVFLSEQKRMRQEIVSEFKKDDRFKDLFSKKLFSELLKEEIYKKGNHQEIDALKSFDKFSGYFIGLHENRKNMYSDGDEITAISNRIVNENFPKFLDNLQKYQEARKKYPEWIIKAESALVAHNIKMDEVFSLEYFNKVLNQEGIQRYNLALGGYVTKSGEKMMGLNDALNLAHQSEKSSKGRIHMTPLFKQILSEKESFSYIPDVFTEDSQLLPSIGGFFAQIENDKDGNIFDRALELISSYAEYDTERIYIRQADINRVSNVIFGEWGTLGGLMREYKADSINDINLERTCKKVDKWLDSKEFALSDVLEAIKRTGNNDAFNEYISKMRTAREKIDAARKEMKFISEKISGDEESIHIIKTLLDSVQQFLHFFNLFKARQDIPLDGAFYAEFDEVHSKLFAIVPLYNKVRNYLTKNNLNTKKIKLNFKNPTLANGWDQNKVYDYASLIFLRDGNYYLGIINPKRKKNIKFEQGSGNGPFYRKMVYKQIPGPNKNLPRVFLTSTKGKKEYKPSKEIIEGYEADKHIRGDKFDLDFCHKLIDFFKESIEKHKDWSKFNFYFSPTESYGDISEFYLDVEKQGYRMHFENISAETIDEYVEKGDLFLFQIYNKDFVKAATGKKDMHTIYWNAAFSPENLQDVVVKLNGEAELFYRDKSDIKEIVHREGEILVNRTYNGRTPVPDKIHKKLTDYHNGRTKDLGEAKEYLDKVRYFKAHYDITKDRRYLNDKIYFHVPLTLNFKANGKKNLNKMVIEKFLSDEKAHIIGIDRGERNLLYYSIIDRSGKIIDQQSLNVIDGFDYREKLNQREIEMKDARQSWNAIGKIKDLKEGYLSKAVHEITKMAIQYNAIVVMEELNYGFKRGRFKVEKQIYQKFENMLIDKMNYLVFKDAPDESPGGVLNAYQLTNPLESFAKLGKQTGILFYVPAAYTSKIDPTTGFVNLFNTSSKTNAQERKEFLQKFESISYSAKDGGIFAFAFDYRKFGTSKTDHKNVWTAYTNGERMRYIKEKKRNELFDPSKEIKEALTSSGIKYDGGQNILPDILRSNNNGLIYTMYSSFIAAIQMRVYDGKEDYIISPIKNSKGEFFRTDPKRRELPIDADANGAYNIALRGELTMRAIAEKFDPDSEKMAKLELKHKDWFEFMQTRGD

SEQ ID NO: 210 - protein, 1251 aa, Moraxella bovoculi; identical to SEQ ID NO: 111

SEQ ID NO: 211 - protein, 1069 aa, Francisella hispaniensis
MSIYQGFVNKYNLSKTLRFELIPQGKTRENIKIKGLILDDEKRAKDYKKAKQIIDKYHQFFIEEILSSVCIGEDLLQNYSNIYFKLKKTDDDNLQKEFKNAKDTIKKQISKHINDSERFKNLFNQNLIDAKKGQESDLILWLKQSKDNGIELFKANNDITDIDEALEIIKSFKGWTTYFKGFHDNRKNVYSTDDIPTSIIYRIVDDNLPKFLENKAKYESLKDKAPEAINYEQIKKDLAEELTFDIDYKTSEVNQRVFSLDEVFEIANFNNYLNQSGISKFNTVIGGKFVNGESAKRKGINEYINLYSQQTNDKTLKKFKMSVLFKQILSDTESKSFVIDKLEDDSDVVTTIQSFYEQIAAFKIVEEKSIKETLSLLFDDLKAQKLDLSKVYFKNDKSLTDLSQQVFDDYSVISTAVLEYITQQVAPKNVDNPTKKEQELIAKKTQKAKYLSLETIRDALNEFNKHRDIDKQCQFEKILANFADIPRLLDEITQHKGNLAHIFVKYQNQDKKDLLQTSAEGDVKAIKELLDQTNNLLHKLKIFHITQSEDKANILDKDEHFYLVFEECYFELANIVPIYNKVRNYITQKPYSDEKFKLNFDNSTLANGWDKNKESDNTAILFIKDDKYYLGVMDKKNNKIFNDKAIKENKGEDYKKVVYKLLPGANKMLPKVFFSAKSVNYYNPDKEILRIRNHSTHTKNGSPQKGYEKFEFNIEDCRKFIDFYKQSISRHPEWKDFGFRFSDTKKYNSIDEFYREVENQGYKLTFENISKSYIDSLVNEGKLYLFQIYNKDFSAYSKGRPNLHTLYWKALFDERNLQDVVYKLNGEAELFYRKQSIPKKITHPAKEVIANKNKDNPKKESVFEYDLIKDKRFTEDKFFFHCPITMNFKSSGANKFNDEINLLLKEKANDVHILSIDRGERHLAYYTLVDGKGNIIKQDTFNIIGNDRMKTNYHDKLTAIEKDRDSARKDWKKINNIKEMKEGYLSQVVHEIATLVIDYNAIVIFEDLNFGFKRGRFKVEKQVYQKLEKMLIEKLNYLVFKDNEFDKAGGVLRAYQLTSPFETFKKMGK

SEQ ID NO: 212 - protein, 1463 aa, Saccharobesus litoralis
MSDRLDVLTNQYPLSKTLRFELKPVGATADWIRKHNVIRYHNGKLVGKDAIRFQNYKYLKKMLDEMHRLFLQQALVLEPNSNQAQELTALLRAIENNYCNNNDLLAGDYPSLSTDKTIKISNGLSKLTTDLFDKKFEDWAYQYKEDMPNFWRQDIAELEQKLQVSANAKDQKFYKGIIKKLKNKIQKSELKAETHKGLYSPTESLQLLEWLVRRGDIKLTYLEIGKENEKLNELVPLVELKDIHRNFNNFATYLSGFSKNRENVYSTKFDRRSGYKATSVIARTFEQNLMFCLGNIAKWHKVTEFINQANNYELLQEHGIDWNKQIAALEHKLDVCLAEFFALNNFSQTLAQQGIEKYNQVLAGIAEIAGQPKTQGLNELINLARQKLSAKRSQLPTLQLLYKQILSKGDKPFIDDFKSDQELIAELNEFVSSQIHGEHGAIKLINHELESFINEARAAQQQIYVPKDKLTELSLLLTGSWQAINQWRYKLFDQKQLDKQQKQYSFSLAQVERWLATEVEQQNFYQTEKERQQHKDTQPANVTTSSDGHSILTAFEQQVQTLLTNICVAAEKYRQLSDNLTAIDKQRESESSKGFEQIAVIKTLLDACNELNHFLARFTVNKKDKLPEDRAEFWYEKLQAYIDAFPIYELYNKVRNYLSKKPFSTEKVKINFDNSHFLSGWTADYERHSALLFKFNENYLLGVVNENLSSEEEEKLKLVGGEEHAKRFIYDFQKIDNSNPPRVFIRSKGSSFAPAVEKYQLPIGDIIDIYDQGKFKTEHKKKNEAEFKDSLVRLIDYFKLGFSRHDSYKHYPFKWKASHQYSDIAEFYAHTASFCYTLKEENINFNVLRELSSAGKVYLFEIYNKDFSKNKRGQGRDNLHTSYWKLLFSAENLKDVVLKLNGQAEIFYRPASLAETKAYTHKKGEVLKHKAYSKVWEALDSPIGTRLSWDDALKIPSITEKTNHNNQRVVQYNGQEIGRKAEFAIIKNRRYSVDKFLFHCPITLNFKANGQDNINARVNQFLANNKKINIIGIDRGEKHLLYISVINQQGEVLHQESFNTITNSYQTANGEKRQVVTDYHQKLDMSEDKRDKARKSWSTIENIKELKAGYLSHVVHRLAQLIIEFNAIVALEDLNHGFKRGRFKIEKQVYQKFEKALIDKLSYLAFKDRTSCLETGHYLNAFQLTSKFKGFNNLGKQSGILFYVNADYTSTTDPLTGYIKNVYKTYSSVKDSTEFWQRFNSIRYIASENRFEFSYDLADLKQKSLESKTKQTPLAKTQWTVSSHVTRSYYNQQTKQHELFEVTARIQQLLSKAEISYQHQNDLIPALASCQSKALHKELIWLFNSILTMRVTDSSKPSATSENDFILSPVAPYFDSRNLNKQLPENGDANGAYNIARKGIMLLERIGDFVPEGNKKYPDLLIRNNDWQNFVQRPEMVNKQKKKLVKLKTEYSNGSLFNDLAFK

SEQ ID NO: 213 - protein, 1369 aa, Treponema rectale
MEKTMDDFTNLYSLSKTLRFELKPIAETKENIEKGKFLESDKKKAADYKAVKKIIDNYHKYFIDDVLKNASFTWTKLEEAIKEYNKNRNDDSVVENEQKKLREEILKLFTSDKRYKALTAATPKDLFDTILPEWFGENSNPDLNKTALKTFQKFTSYFTGFQENRKNVYSAEPIPTAVPYRIVNDNFPKFLQNISIFKTIQEKCPQVIDDVEKELSSYLGKEKLADIFTLESFNKYLGQGGKENQRGIDFYNQIIGGIAEKEGEQNLRGINQFLNLYWQQNPEFAKENRRIKMVPLYKQILSDRSSLSFKIESIENDEELKIALLECADKLEGKNEEKKSVFEDTCDLFESLKNQNLQEIYINRKDIKTVSRILTGDWSWLQTRMNVYAEEKFTTKAEKARWQKSLDDEGENKSKGFYSLAELNKVLEYSSENVTETDIRITDYFEHRCRYYIEKESERFVQGSELIALSIKEMCDDIQTKRKGMDRVLENLSDEKLLKEKTEDIAVIKNYLVAVQNLLHRIKPLKVNGVGDSSFYAIYDSIYSALSEVISVYNKTRNYITKKAASPEKYKLNFDNPTLADGWDLNKEQANTSVLLRKDGMYYLGIMNPKNKPKFAEKYEVADGQSCYEKMIYKQFDATKQIPKCSTQKKEVQKYFLSGATEPYILNDKKSFKSELIITKDIWFMNNHVWNGEKFVPKRDNETRPKKFQIGYFKQTGDFDGYKNALSKWISFCKEFLQSYISSTVYDYNFKKSDEYEGLDDFYNYLNATCYKLTFINIPESEIEKMVSEGKLYLFQIYNKDFAPGANGRPNMHTLYWKNLFSDENLKNVCLKLNGEAELFYRPAGIKDPVVHKEGSYLVNRTTEDGESIPEKIYLEIYKNANGKLDSLSDEAKSYKENHKIVIKKASHEIIKDRHYTEAKFLFHVPITINFKASGNSFSINENVRRFLKNNPDVNIIGLDRGERHLIYLSLINQKGEILKQFTFNEVERDKNGQTVKVNYHEKLDQREKERDSARKSWQTVGKIAELKEGYLSAVIHQLTKLMVEYNAIVVMEDLNFGFKRGRFHVEKQVYQKFEHMLIDKLNYLVFKDRGLNEPSGVLNGYQLTGQFESFQKLGKQSGMLFYVPAGYTSKIDPKTGFVSMMNFKDLTNVHKKRNFFSNFNDIHFDDATGSFVFTFDYKNYDGKAKEEMKQTKWSVYSRDKRIVYFPKVKSYEDIQPTEKLKALFETAGIDYKSGNPILDSIMTIGADLKEGAKPSKEIAEFWDGLLYNFKLILQMRNSNARTGEDYIISPVMADTGTFFDSREELKKGEDAKLPLDADANGAYHIALKGLELINKINLTDENELKKMKISISNADWFQFAQEKNYAKG

SEQ ID NO: 214 - protein, 1278 aa, Ruminococcus bovis
MSININKFSDECRKIDFFTDLYNIQKTLRFSLIPIGATADNFEFKGRLSKEKDLLDSAKRIKEYISKYLADESDICLSQPVKLKHLDEYYELYITKDRDEQKFKSVEEKLRKELADLLKEILKRLNKKILSDYLPEYLEDDEKALEDIANLSSFSTYFNSYYDNCKNMYTDKEQSTAIPYRCINDNLPKFIDNMKAYEKALEELKPSDLEELRNNFKGVYDTTVDDMFTLDYFNCVLSQSGIDSYNAIIGNDKVKGINEYINLHNQTAEQGHKVPNLKRLYKQIGSQKKTISFLPSKFESDNELLKAVYDFYNTGDAEKNFTALKDTITEFEKIFDNLSEYNLDGVFVRNDISLTNLSQSMFNDWSVFRNLWNDQYDKVNNPEKAKDIDKYNDKRHKVYKKSESFSINQLQELIATTLEEDINSKKITDYFSCDFHRVTTEVENKYQLVKDLLSSDYPKNKNLKTSEEDVALIKDFLDSVKSLESFVKILTGTGKESGKDELFYGSFTKWFDQLRYIDKLYDKVRNYITEKPYSLDKIKLSFDNPQFLGGWQHSKETDYSAQLFMKDGLYYLGVMDKETKREFKTQYNTPENDSDTMVKIEYNQIPNPGRVIQNLMLVDGKIVKKNGRKNADGVNAVLEELKNQYLPENINRIRKTESYKTTSNNFNKDDLKAYLEYYIARTKEYYCKYNFVFKSADEYGSFNEFVDDVNNQAYQITKVKVSEKQLLSLVEQGKLYLFKIYNKDFSEYSKGKKNLHTMYFQMLFDDRNLENLVYKLQGGAEMFYRPASIKKDSEFKHDANVEIIKRTCEDKVNDKDNPTDDEKAKYYSKFDYDIVKNKRFTKDQFSLHLTLAMNCNQPDHYWLNNDVRELLKKSNKNHIIGIDRGERNLIYVTIINSDGVIVDQINFNIIENSYNGKKYKTDYQKKLNQREEDRQKARKTWKTIETIKELKDGYISQVVHQICKLIVQYDAIVVMENLNGGFKRGRTKVEKQVYQKFETMLINKLNYYVDKGTDYKECGGLLKAYQLTNKFETFERIGKQSGIIFYVDPYLTSKIDPVTGFANLLYPKYETIPKTHNFISNIDDIRYNQSEDYFEFDIDYDKFPQGSYNYRKKWTICSYGNRIKYYKDSRNKTASVVVDITEKFKETFTNAGIDFVNDNIKEKLLLVNSKELLKSFMDTLKLTVQLRNSEINSDVDYIISPIKDRNGNFYYSENYKKSNNEVPSQPQDGDANGAYNIARKGLMIINKLKKADDVTNNELLKISKKEWLEFAQKGDLGE

SEQ ID NO: 215 - protein, 1205 aa, Pseudobutyrivibrio xylanivorans
MYYQGLTKLYPISKTIRNELIPVGKTLEHIRMNNILEADIQRKSDYERVKKLMDDYHKQLINESLQDVHLSYVEEAADLYLNASKDKDIVDKFSKCQDKLRKEIVNLLKSHENFPKIGNKEIIKLLQSLSDTEKDYNALDSFSKFYTYFTSYNEVRKNLYSDEEKSSTAAYRLINENLPKFLDNIKAYSIAKSAGVRAKELTEEEQDCLFMTETFERTLTQDGIDNYNELIGKLNFAINLYNQQNNKLKGFRKVPKMKELYKQILSEREASFVDEFVDDEALLTNVESFSAHIKEFLESDSLSRFAEVLEESGGEMVYIKNDTSKTTFSNIVFGSWNVIDERLAEEYDSANSKKKKDEKYYDKRHKELKKNKSYSVEKIVSLSTETEDVIGKYIEKLQADIIAIKETREVFEKVVLKEHDKNKSLRKNTKAIEAIKSFLDTIKDFERDIKLISGSEHEMEKNLAVYAEQENILSSIRNVDSLYNMSRNYLTQKPFSTEKFKLNFNRATLLNGWDKNKETDNLGILLVKEGKYYLGIMNTKANKSFVNPPKPKTDNVYHKVNYKLLPGPNKMLPKVFFAKSNLEYYKPSEDLLAKYQAGTHKKGENFSLEDCHSLISFFKDSLEKHPDWSEFGFKFSDTKKYDDLSGFYREVEKQGYKITYTDIDVEYIDSLVEKDELYLFQIYNKDFSPYSKGNYNLHTLYLTMLFDERNLRNVVYKLNGEAEVFYRPASIGKDELIIHKSGEEIKNKNPKRAIDKPTSTFEYDIVKDRRYTKDKFMLHIPVTMNFGVDETRRFNEVVNDAIRGDDKVRVIGIDRGERNLLYVVVVDSDGTILEQISLNSIINNEYSIETDYHKLLDEKEGDRDRARKNWTTIENIKELKEGYLSQVVNVIAKLVLKYDAIICLEDLNFGFKRGRQKVEKQVYQKFEKMLIDKLNYLVIDKSRSQENPEEVGHVLNALQLTSKFTSFKELGKQTGIIYYVPAYLTSKIDPTTGFANLFYVKYESVEKSKDFFNRFDSICFNKVAGYFEFSFDYKNFTDRACGMRSKWKVCTNGERIIKYRNEEKNSSFDDKVIVLTEEFKKLFNEYGIAFNDCMDLTDAINAIDDASFFRKLTKLFQQTLQMRNSSADGSRDYIISPVENDNGEFFNSEKCDKSKPKDADANGAFNIARKGLWVLEQLYNSSSGEKLNLAMTNAEWLEYAQQHTI

SEQ ID NO: 216 - protein, 1312 aa, Helcococcus kunzii
MFEKLSNIVSISKTIRFKLIPVGKTLENIEKLGKLEKDFERSDFYPILKNISDDYYRQYIKEKLSDLNLDWQKLYDAHELLDSSKKESQKNLEMIQAQYRKVLFNILSGELDKSGEKNSKDLIKNNKALYGKLFKKQFILEVLPDFVNNNDSYSEEDLEGLNLYSKFTTRLKNFWETRKNVFTDKDIVTAIPFRAVNENFGFYYDNIKIFNKNIEYLENKIPNLENELKEADILDDNRSVKDYFTPNGFNYVITQDGIDVYQAIRGGFTKENGEKVQGINEILNLTQQQLRRKPETKNVKLGVLTKLRKQILEYSESTSFLIDQIEDDNDLVDRINKFNVSFFESTEVSPSLFEQIERLYNALKSIKKEEVYIDARNTQKFSQMLFGQWDVIRRGYTVKITEGSKEEKKKYKEYLELDETSKAKRYLNIREIEELVNLVEGFEEVDVFSVLLEKFKMNNIERTEFEAPIYGSPIKLEAIKEYLEKHLEEYHKWKLLLIGNDDLDTDETFYPLLNEVISDYYIIPLYNLIRNYLTRKHSDKDKIKVNFDFPTLADGWSESKISDNRSIILRKDGYYYLGILEDNKLFNNIKSNSLKNYYEIMRYNLFPDAAKMIPKCSISKKEVKNHFENGVDKSIYLDNQFVSPLEISKELYELQNNLVDGKKKYQIDYLRNTDDEVGYKNALVQWITFCKDFLLKYQGTQDFDYSELKEAKYYDKLDQFYADVDSCGYNLDFDNIDEDLVNKAVEDGKLLIFQIYNKDFSPESKGKKNLHTLYWLSMFSEENLRTRKLKLNGQAEIFYRKKLEKKPIIHKEGSILLNKIDKEGNTIPENIYHECYRYLNKKIGREDLSDEAIALFNKDVLKYKEARFDIIKDRRYSESQFFFHVPITFNWDIKTNKNVNQIVQGMIKDGEIKHIIGIDRGERHLLYYSVIDLEGNIVEQGSLNTLEQNRFDNSTVKVDYQNKLRTREEDRDRARKNWTNINKIKELKDGYLSHVVHKLSRLIIKYEAIVIMENLNQGFKRGRFKVERQVYQKFELALMNKLSALSFKEKYDEGKNLEPSGILNPIQACYPVDAYQELQGQNGIVFYLPAAYTSVIDPVTGFTNLFRLKSINSSKYEEFIKKFKNIYFDNEEEDFKFIFNYKDFAKANLVILNNIKSKDWKISTRGERISYNSKKKEYFYVQPTEFLINKLKELNIDYENIDIIPLIDNLEEKAKRKILKALFDTFKYSVQLRNYDFENDYIISPTADDNGNYYNSNEIDIDKTNLPNNGDANGAFNIARKGLLLKDRIVNSNESKVDLKIKNEDWINFIIS

SEQ ID NO: 217 - protein, 1282 aa, Lachnospira eligens; identical to SEQ ID NO: 208

SEQ ID NO: 218 - protein, 1347 aa, Unknown
  candidate division WWE3 bacterium CG22
MASSHFISLDNSFSKFTNLYSLSKTLRFELVPTENTTVMLENNNVFKKDQIIQVKYEKTKPFIDRLHREFIKEALSNYAVSGLQEYFEILRAGGKKANLDSAKKQLRKHVVDQFNATASLWVSRHKDVGFKGEGIELLFKEAVFKLLKEKYGTDMNALIEDNHGKQISIFDSWKGFTGYFDKFQQTRRNLYKDDGKEGRVATRIIDQNLTRFCDNIFVYEKIKDKVSFIDVEKSFGKTCSEVFIPDYYNTCLLQDGIDSYNEFIGGKPLENGEKVQGLNELINLYRQTTGDKVPYFKKLEKQILGEKDEVFIDEITDEDFVPRVLAFYRTVDAKYKLFLKLLDDFVTNQDVYELSQIYISKKGLQEKLYRWLTPSAREVYDEELFEVLKKAKKVNNKDKQKVSGYVPDFVEVLYIKQALENIDAKLIWSDRYYSDGENEGIIDKGFSSWKQFLVILNHEYRQLLSFEDHVIIDKELDFDKEVKQLTDTVEIVSQDKNARTVTYRGGYDVYKAKLAELGQSFEKDTCTKKVIKNFADSVLSMYHFAMMFAVWDDTYPLDVFYTNNEFGYLLYYEDAYKNIVQEYNKLRNYLTKKPYSTEKWKLNFENPTLAAGFDKNKESDNSTVILRQGDKYFLGVMKKGFNKIFDNSQISQTGNSPEAYFEKMVYKYTKDVVTGIPKSSTQVKEVQEHFRNSDEDFFLEECSSVGNFIVPLKITKEIFDLNNKVYAKEDISQAMYRWALNTDEEKNYVKSFQKSYLSLGGSPELYCKSVTLWIGFCLNFLKSYPSAAYFDYSQLRQASDYESVDECYQELNNAGYTILFQNVSEKYVRVKNKNGELYLFQIKNKDWNEGSTGKKNLHTLYFESLFSKENAKQGFPFKLSGNAELFFRPGSIEQTYERRNFPREIPLKRRYSKDGIFFHIPVQVNRTKVGSPNQFNKEVNDFLAGNPNINIIGVDRGEKHLVYYSVISQNGEKIDGGSFNEINGQDYHDKLEKRAKEREQQRRDWETVEGIKDLKKGYISQVVKKLADLAIEHNAIIVMEDLNMRFKQIRGGIEKSVYQQLEKALIDKLSFLVNKGEVDPQKAGHLLKAYQLTAPIDAFKDMGKQTGIMFYTQAAYTSKIDPVTGWRPHLYLKYSSVEKAKDDISRFTKIAYKNDRFEFTYNITDFRTQKEWPLKTEWTVCSCVERFRWNKKLANGKGDYEHYPNVTDDFKKLFDSVGINYLQENIKSQVVNLDENTNVEFFREFIKLFALVCQIRNTNSEEAGNLNDFILSPVEPFFDSRSAEDFGKGLPSNGDENGAYNIARKGMIILNTLSTFKNDHGSCEGLSWGDLYISDTQWDDFAQSFHG

SEQ ID NO: 219 - protein, 1132 aa, Unknown
  Patescibacteria group bacterium
MEVKNTSFEQFTDQYSLSKTLRFELRPVGETPKMLEENNVFGKDKNIQKKYEQTKPFFDRLHRDFVKDALTNVQLDGLREYFEIWKMWQADSKNKDKKKKLENKEKQLRKNIVGLFDDTAKKWLEKYSNVQIKKKDRDFLFEENIFSLLQELYGKEEDAFLKDEKGEYIVVEKDEKKEKISLFEDWKGFVGYFGKFFETRKNFYKDDGTASAIATRIVDQNLRRFCNNLLESDKANKKVDFLEVESTFNIEMKDIFSIEYYSNCLSQEGIDAYNRILGADSKTQGMEGINQYINKYRQKNKGEQVNFLKGLDKQILSEKMKFIDEIESDEGLEIILNELKENVDKKVKMFKKLFFDFVDHNDSYDLSKIYFSKESLNTILYRWFSEPQLIQEKLFEVLNKKDVKAWYEARKISSKDSSLKKDDDGTFSFPSFVQLAHIREALENIGKDVRVWKENYYKEDDNKKQKAILTQGELIWDEFLAVFKIEFQTLFEQVIEKEGKKEIIAYDVYFEQFEHLLNNFQNNDTAKEIIKLFLDSALSIYQMAKYFAVEKKRNWIEKYEIDDNFYDHIEYGYKKFYDGSYDEFILPYNKVRNYLTKKPYSEEKWKLNFENSTLADGWDKNKESDNSAVLLKKDSQYFLALMKKGNNKIFDDKNNQYFIKDIEKGKYEKVTYKLLPGANKMLPKVFFSKKSIDFFAPSERVLDIRNHSSHSKNGNPQKGFEKKDFNLQDCYEIIDFFKDSLSKHEEWNQFDFIFSDTGKYKDISDFYREVSAQGYKISFQDISEKYIQEKNEAGELYLFQIKNKDWNEGSKGKKNLQTLYFESLFSQENMQNNFSMKLNGQAEIFYRPKTDDKKLGKKLDKSGKEIVNHKRYSENKILFHVPITINRTSGDTNQYRFNQEVNNFLAQNKDINIIGIDRGEKHLAYYSVIDQNGKIIYQDTLNIVNGIDYAQKLEEVAKGREQARKDWKTVEGIKNLKQGYISQVVHEITDLAIKHNAIIVLEDLNMRFKQIRGGIEKSVYQQLEKALIDKLSFLVKKGEKDPEKAGNLLRAYQLAAPFESFQKMGKQTGIIFYTQASYTSKTCPNCGFRPNLRFKYNSIDKSKELLKKLDNFFIFSRKKCFCNRLFCFSILE

SEQ ID NO: 220 - protein, 871 aa, Unknown
  Prevotella sp. P4-98
MKAINEYYKQLGAYCREEGKEKDDFFKRIDGAYCAISHLFFGEHGEIAQSDSDVELIQKLLEAYKGLQRFIKPLLGHGDEADKDNEFDAKLRKVWDELDIITPLYDKVRNWLSRKIYNPEKIKLCFENNGKLLSGWVDSRTKSDNGTQYGGYIFRKKNEIGEYDFYLGISADTKLFRRDAAISYDDGMYERLDYYQLKSKTLLGNSYVGDYGLDSMNLLSAFKNAAVKFQFEKEVVPKDKENVPKYLKRLKLDYAGFYQILMNDDKVVDAYKIMKQHILATLTSSIRVPAAIELATQKELGIDELIDEIMNLPSKSFGYFPIVTAAIEEANKRENKPLFLFKMSNKDLSYAATASKGLRKGRGTENLHSMYLKALLGMTQSVFDIGSGMVFFRHQTKGLAETTARHKANEFVANKNKLNDKKKSIFGYEIVKNKRFTVDKYLFKLSMNLNYSQPNNNKIDVNSKVREIISNGGIKNIIGIDRGERNLLYLSLIDLKGNIVMQKSLNILKDDHNAKETDYKGLLTEREGENKEARRNWKKIANIKDLKRGYLSQVVHIISKMMVEYNAIVVLEDLNPGFIRGRQKIERNVYEQFERMLIDKLNFYVDKHKGANETGGLLHALQLTSEFKNFKKSEHQNGCLFYIPAWNTSKIDPATGFVNLFNTKYTNAVEAQEFFSKFDEIRYNEEKDWFEFEFDYDKFTQKAHGTRTKWTLCTYGMRLRSFKNSAKQYNWDSEVVALTEEFKRILGEAGIDIHENLKDAICNLEGKSQKYLEPLMQFMKLLLQLRNSKAGTDEDYILSPVADENGIFYDSRSCGDQLPENADANGAYNIARKGLMLIEQIKNAEDLNNVKFDISNKAWLNFAQQKPYKNG

SEQ ID NO: 221 - protein, 1320 aa, Unknown
  bacterial
MQQYQVSKTVRFGLTLKNSEKKHATHLLLKDLVNVSEERIKNEITKDDKNQSELSFFNEVIETLDLMDKYIKDWENCFYRTDQIQLTKEYYKVIAKKACFDWFWTNDRGMKFPTSSIISFNSLKSSDKSKTSDNLDRKKKILDYWKGNIFKTQKAIKDVLDITEDIQKAIEEKKSHREINRVNHRKMGIHLIHLINDTLVPLCNGSIFFGNISKLDFCESENEKLIDFASTEKQDERKFLLSKINEIKQYFEDNGGNVPFARATLNRHTANQKPDRYNEEIKKLVNELGVNSLVRSLKSKTIEEIKTHFEFENKNKINELKNSFVLSIVEKIQLFKYKTIPASVRFLLADYFEEQKLSTKEEALTIFEEIGKPQNIGFDYIQLKEKDNFTLKKYPLKQAFDYAWENLARLDQNPKANQFSVDECKRFFKEVFSMEMDNINFKTYALLLALKEKTTAFDKKGEGAAKNKSEIIEQIKGVFEELDQPFKIIANTLREEVIKKEDELNVLKRQYRETDRKIKTLQNEIKKIKNQIKNLENSKKYSFPEIIKWIDLTEQEQLLDKNKQAKSNYQKAKGDLGLIRGSQKTSINDYFYLTDKVYRKLAQDFGKKMADLREKLLDKNDVNKIKYLSYIVKDNQGYQYTLLKPLEDKNAEIIELKSEPNGDLKLFEIKSLTSKTLNKFIKNKGAYKEFHSAEFEHKKIKEDWKNYKYNSDFIVKLKKCLSHSDMANTQNWKAFGWDLDKCKSYETIEKEIDQKSYQLVEIKLSKTTIEKWVKENNYLLLPIVNQDITAEKLKVNTNQFTKDWQHIFEKNPNHRLHPEFNIAYRQPTKDYAKEGEKRYSRFQLTGQFMYEYIPQDANYISRKEQITLFNDKEEQKIQVETFNNQIAKILNAEDFYVIGIDRGITQLATLCVLNKNGVIQGGFEIFTREFDYTNKQWKHTKLKENRNILDISNLKVETTVNGEKVLVDLSEVKTYLRDENGEPMKNEKGVILTKDNLQKIKLKQLAYDRKLQYKMQHEPELVLSFLDRLENKEQIPNLLASTKLISAYKEGTAYADIDIEQFWNILQTFQTIVDKFGGIENAKKTMEFRQYTELDASFDLKNGVVANMVGVVKFIMEKYNYKTFIALEDLTFAFGQSIDGINGERLRSTKEDKEVDFKEQENSTLAGLGTYHFFEMQLLKKLSKTQIGNEIKHFVPAFRSTENYEKIVRKDKNVKAKIVSYPFGIVSFVNPRNTSISCPNCKNANKSNRIKKENDRILCKHNIEKTKGNCGFDTANFDENKLRAENKGKNFKYISSGDANAAYNIAVKLLEDKIFEINKK

SEQ ID NO: 222 - protein, 1320 aa, Unknown; identical to SEQ ID NO: 221
  bacterial

SEQ ID NO: 223 - RNA, 66 nt, Butyrivibrio hungatei
gggaguucaaaaauugcaaaccuccgucuuaauuucuaugcccgacgugaaaaaggcuuuuagaug

SEQ ID NO: 224 - RNA, 72 nt, Butyrivibrio hungatei
aagaagcugacggggagauaaaaacucaaaaauaauuauccacaaaaugcuuauauaucaguacuuuuuuau

SEQ ID NO: 225 - RNA, 74 nt, Butyrivibrio hungatei
uaugugcuauaauauauuagugcuuucaaaauuguaaaucaagguguuaauauuuuuaaaaugcgaaaaaauca

SEQ ID NO: 226 - RNA, 80 nt, Butyrivibrio hungatei
uaaaaauaugacuguuguuauauaucaaaaugcuaaaaaaaucauagauuuuaggucuuuuuuugcugauuuaggcaaaa

SEQ ID NO: 227 - RNA, 89 nt, Eubacterium eligens
ugcaaacaugggcuuugauaaauuauuauuuaaagguuauucaauaaaauaugaaaaaauacacaaauaaauuguuuuuuaagguuaua

SEQ ID NO: 228 - RNA, 87 nt, Unknown
  Candidatus Methanoplasma termitum strain MpT1
uggguuaugcgauacaugaggaaucagacauuguaaucgucugaugcaaaccccggucuuaauuuuucauuucgucaguuuucaaau

SEQ ID NO: 229 - RNA, 95 nt, Moraxella bovoculi
agagagcuaaagcacgcucaaauauuuacuuugcaaaccucagucuuaaugcgugauuuaucauguuuugucgguaaaaaugauuauuuuuugug

SEQ ID NO: 230 - RNA, 95 nt, Francisella hispaniensis
guucuuagagauauuuaaaaauaugacuguuguuauauaccaaaaugcuaaaaagaugauagauuuuaggucuuuuuuugcucauuuaggcaaaa

SEQ ID NO: 231 - RNA, 94 nt, Saccharobesus litoralis
agucuuaauggcuaauuagguuaaaaaugaugaauguaagguuagaaaacacagauaaauugauagaaaaacgcgcuguugcccgcuuuuugac

SEQ ID NO: 232 - RNA, 80 nt, Treponema rectale
accuuaggucuuacuggagaauuugaugaaaaaauugcuuuuuuuaucaauuuuggccgcauuauaugcgauaaacagca

SEQ ID NO: 233 - RNA, 80 nt, Ruminococcus bovis
aaccucagucuuuauuuuagauauucuuugaaaaagguuguuaaacaaugaagauuauaugcacaaugaacaauugcaua

SEQ ID NO: 234 - RNA, 85 nt, Pseudobutyrivibrio xylanivorans
ugucagauaugguuaugcuaaaaauguggaaaaggaucuagucaugauaacauaauugcaaaccuguaauugaauuuugauauua

SEQ ID NO: 235 - RNA, 80 nt, Helcococcus kunzii
ucuuaaaggauaucuaaaaauguauucauuaaaugagaguuuaugcauugcaauacuaacuauagugacauucggagcgc

SEQ ID NO: 236 - RNA, 80 nt, Lachnospira eligens
uuauuacauaaugcaaacaugggcuuugauaaauuauuauuuaaagguuauucaauaaaauaugaaaaaauacacaaaua

SEQ ID NO: 237 - RNA, 93 nt, Unknown
  candidate division WWE3 bacterium CG22
gaaugaguguagauuugcggacauuuauaauauggugaaagaggaaaucacucuguaacggaauaguaaaaccuuaguguuaaugauuuuugc

SEQ ID NO: 238 - RNA, 90 nt, Unknown
  Patescibacteria group bacterium
caauaugcaaagcuugcgaagaaaaaauaguucguuauggauaugcaaagaaugaagaagacgaagugauaaugauuugauuuuugauca

SEQ ID NO: 239 - RNA, 94 nt, Unknown
  Prevotella sp. P4-98
gaguacaaaccucugucuauauguaauugcgaaauaugauacaucuuguuauaacacaaucaguugcgcaaucugcgaagugcgauuuuuguug

SEQ ID NO: 240 - RNA, 89 nt, Unknown
  bacterial
aguuacuauuguaacaauugcaaaccuaggucuuaauauucuauaauaugacaaaaagcauaaaaacaagccaagaagcauuguuuuuu

SEQ ID NO: 241 - RNA, 70 nt, Unknown
  bacterial
uuuuaugcuuuuugucauauuauagaauauuaagaccuagguuugcaauuguuacaauaguaacuuuuuu

What is claimed:

1. A method of editing a genetic locus with a Cas12a nuclease, comprising contacting DNA that comprises the genetic locus with:
(a) a Cas12a nuclease; and
(b) an engineered Cas12a crRNA that includes a spacer sequence that is designed to hybridize with a target sequence in the genetic locus; and
(c) a Cas12a tracrRNA,
thereby editing the genetic locus;
wherein the Cas12a tracrRNA increases the efficiency of editing of the genetic locus.

2. The method of claim 1, wherein the DNA that comprises the genetic locus is:
(a) genomic nuclear DNA of a non-human animal, a human, a plant, or a fungus, or DNA of a eukaryotic organelle;
(b) in a eukaryotic DNA molecule in vitro;
(c) in a eukaryotic cell, cell line, tissue, callus, or multicellular organism.

3. The method of claim 1, wherein the DNA that comprises the genetic locus is in a eukaryotic cell in vitro, ex vivo, or in vivo.

4. The method of claim 1, wherein the Cas12a nuclease is provided:
(a) as a Cas12a nuclease protein; or
(b) as a ribonucleoprotein complex comprising the Cas12a nuclease and the engineered Cas12a crRNA; or
(c) as a polynucleotide encoding the Cas12a nuclease.

5. The method of claim 1, wherein the Cas12a nuclease is:
(a) a Cas12a nuclease identified from the genome of a bacterial species selected from the group consisting of Francisella tularensis 1, Prevotella albensis, Lachnospiraceae bacterium MC2017 1, Butyrivibrio proteoclasticus, Peregrinibacteria bacterium GW2011_GWA2_33_10, Parcubacteria bacterium GW2011_GWC2_44_17, Smithella sp. SCADC, Acidaminococcus sp. BV3L6, Lachnospiraceae bacterium MA2020, Candidatus Methanoplasma termitum, Eubacterium eligens, Moraxella bovoculi 237, Leptospira inadai, Lachnospiraceae bacterium ND2006, Porphyromonas crevioricanis 3, Prevotella disiens and Porphyromonas macacae; or
(b) a Cas12a nuclease selected from the group consisting of LbCas12a, AsCas12a, FnCas12a, and a deactivated Cas12a nuclease; or
(c) a Cas12a nuclease having at least 80% sequence identity with a sequence selected from the group consisting of SEQ ID NOs:11, 107-138, 172, 204-221, and 222; or
(d) a Cas12a nuclease variant selected from the group consisting of (1) a variant LbCpf1 that differs from a wild-type LbCpf1 sequence (SEQ ID NO:135) in containing at least one point mutation selected from the group consisting of G309P, Y312F, M4741, D523N, Q531K, C930A, D937N, V954F/Q, M975L, A984E, I994L, T1006K, I1014V, V1055N/D, L1065F/Y, Y1180F, V1209G, I1229L, V801I, Y802I, D850A, E943A, and D1198A; (2) a variant AsCpf1 that differs from a wild-type AsCpf1 sequence (SEQ ID NO:134) in containing at least one point mutation selected from the group consisting of L320P, V980A, Q987N, T1004F/Q, K1035E, T1057K, D1107N, F1117Y, N1291L, D908A, E993A, and D1263A; (3) a variant FnCpf1 that differs from a wild-type FnCpf1 sequence (SEQ ID NO:172) in containing at least one point mutation selected from the group consisting of I339P, L342F, Q588K, F1017Q, K1047E, N1118D, F1128Y, L867I, D917A, E1006A, and D1255A; and (4) a variant ObCsm1 sequence that differs from a wildtype ObCsm1 sequence (SEQ ID NO:137) in containing at least one point mutation selected from the group consisting of K382N, Q393K, S925A, E933N, K943F/Q, K972L, K1064G, P670I, N671I, D727A, E939A, and D1053A.

6. The method of claim 1, wherein the Cas12a tracrRNA is provided:
(a) as DNA encoding a first RNA molecule comprising the Cas12a tracrRNA and comprising a restriction endonuclease cleavage site that is suitable for insertion of a sequence coding for a functional RNA moiety; or
(b) as a functional RNA molecule comprising the Cas12a tracrRNA and a functional RNA moiety, or as a polynucleotide encoding the functional RNA molecule; or
(c) by a DNA expression system comprising (i) DNA sequence for a first promoter; and (ii) operably linked and heterologous to the first promoter, DNA encoding a first RNA molecule comprising a Cas12a tracrRNA and comprising a restriction endonuclease cleavage site that is suitable for insertion of a sequence coding for a functional RNA moiety; and (iii) optionally, a terminator 3′ to and operably linked to the DNA encoding the first RNA molecule; or
(d) by a DNA expression system comprising: (i) DNA sequence for a first promoter; and (ii) operably linked and heterologous to the first promoter, a DNA encoding a functional RNA molecule comprising a Cas12a tracrRNA and a functional RNA moiety; and (iii) optionally, a terminator 3′ to and operably linked to the DNA encoding a functional RNA molecule; or
(e) as a Cas12a tracrRNA synthesized in vitro; or
(f) as a Cas12a tracrRNA obtained from a naturally occurring source.

7. The method of claim 1, wherein the Cas12a tracrRNA:
(a) is identified from the same genomic region as the Cas12a nuclease by at least the following steps:
(i) identifying in the genomic region flanking the DNA encoding the Cas12a nuclease at least one nucleotide sequence that comprises a CRISPR array including direct repeats; and
(ii) identifying as a putative Cas12a tracrRNA at least one nucleotide sequence in either the sense or antisense direction in the genomic region flanking the DNA encoding the Cas12a nuclease, wherein the putative Cas12a tracrRNA has a nucleotide sequence that has at least 50% complementarity with, the nucleotide sequence of the direct repeat; or
(b) has a nucleotide sequence comprising a sequence selected from the group consisting of SEQ ID NOs:1, 3, 6, 139-146, 149-169, 223-240, and 241.

8. The method of claim 1, wherein the Cas12a tracrRNA is provided:
(a) in a molar excess, relative to the Cas12a nuclease; or
(b) in a molar amount that is at least 10-fold greater than the molar amount of the Cas12a nuclease.

9. The method of claim 1, wherein the Cas12a tracrRNA has a nucleotide sequence having sufficient complementarity to the engineered Cas12a crRNA's 3′ extension to allow hybridization between the tracrRNA and the engineered Cas12a crRNA.

10. The method of claim 1, wherein the engineered Cas12a crRNA, or a polynucleotide encoding the engineered Cas12a crRNA, further comprises at least one direct repeat sequence or fragment thereof capable of associating with the Cas12a nuclease adjacent to and 3′ to the spacer sequence.

11. The method of claim 1, wherein the engineered Cas12a crRNA further comprises a 3′ extension adjacent to the spacer sequence.

12. The method of claim 1, wherein the editing of the genetic locus is:
(a) effecting an indel in the genetic locus; or
(b) effecting non-homologous end joining (NHEJ) in the genetic locus; or
(c) effecting homology-dependent repair (HDR) in the genetic locus.

13. A composition for modifying a genetic locus in a eukaryotic cell, comprising:
(a) a Cas12a nuclease, or a polynucleotide encoding the Cas12a nuclease; and
(b) an engineered Cas12a crRNA that includes a spacer sequence corresponding to a specific sequence in the genetic locus, or a polynucleotide encoding the Cas12a crRNA; and
(c) a Cas12a tracrRNA, or a polynucleotide encoding the Cas12a tracrRNA, wherein the Cas12a tracrRNA is provided in molar excess relative to the Cas12a nuclease; and optionally (d) a eukaryotic cell containing a genetic locus to be modified.

14. The composition of claim 13, wherein the Cas12a tracrRNA:
(a) is identified from the same genomic region as the Cas12a nuclease by at least the following steps:
(i) identifying in the genomic region flanking the DNA encoding the Cas12a nuclease at least one nucleotide sequence that comprises a CRISPR array including direct repeats; and
(ii) identifying as a putative Cas12a tracrRNA at least one nucleotide sequence in either the sense or antisense direction in the genomic region flanking the DNA encoding the Cas12a nuclease, wherein the putative Cas12a tracrRNA has a nucleotide sequence that has at least 50% complementarity with, the nucleotide sequence of the direct repeat; or
(b) has a nucleotide sequence comprising a sequence selected from the group consisting of SEQ ID NOs:1, 3, 6, 139-146, 149-169, 223-240, and 241.

15. The composition of claim 13, wherein the Cas12a tracrRNA is:
(a) present in a molar excess, relative to the Cas12a nuclease; or
(b) present in a molar amount that is at least 10-fold greater than the molar amount of the Cas12a nuclease.

16. The composition of claim 13, wherein the genetic locus in a eukaryotic cell is:
(a) in genomic nuclear DNA of a non-human animal, a human, a plant, or a fungus, or in DNA of a eukaryotic organelle;
(b) in a eukaryotic DNA molecule in vitro;
(c) in a eukaryotic cell, cell line, tissue, callus, or multicellular organism.

17. The composition of claim 13, wherein the eukaryotic cell is:
(a) a cell of a non-human animal, a human, a plant, or a fungus; or
(b) a cell of a cell line or a cell of a multicellular organism, and wherein the genetic locus to be modified comprises a locus of interest in the genome of the eukaryotic cell; or
(c) a eukaryotic cell in vitro, ex vivo, or in vivo.

18. The composition of claim 13, wherein the Cas12a tracrRNA is provided:
(a) as DNA encoding a first RNA molecule comprising the Cas12a tracrRNA and comprising a restriction endonuclease cleavage site that is suitable for insertion of a sequence coding for a functional RNA moiety; or
(b) as a functional RNA molecule comprising the Cas12a tracrRNA and a functional RNA moiety, or as a polynucleotide encoding the functional RNA molecule; or
(c) by a DNA expression system comprising (i) DNA sequence for a first promoter; and (ii) operably linked and heterologous to the first promoter, DNA encoding a first RNA molecule comprising a Cas12a tracrRNA and comprising a restriction endonuclease cleavage site that is suitable for insertion of a sequence coding for a functional RNA moiety; and (iii) optionally, a terminator 3′ to and operably linked to the DNA encoding the first RNA molecule; or
(d) by a DNA expression system comprising: (i) DNA sequence for a first promoter; and (ii) operably linked and heterologous to the first promoter, a DNA encoding a functional RNA molecule comprising a Cas12a tracrRNA and a functional RNA moiety; and (iii) optionally, a terminator 3′ to and operably linked to the DNA encoding a functional RNA molecule; or
(e) as a Cas12a tracrRNA synthesized in vitro; or
(f) as a Cas12a tracrRNA obtained from a naturally occurring source.

19. The composition of claim 13, wherein the Cas12a tracrRNA is provided as a functional RNA molecule comprising the Cas12a tracrRNA and a functional RNA moiety, or as a polynucleotide encoding the functional RNA molecule, wherein the functional RNA moiety comprises an RNA sequence for annealing to a donor polynucleotide, and wherein the composition further comprises the donor polynucleotide.

20. The composition of claim 13, wherein the Cas12a nuclease is:
(a) a Cas12a nuclease identified from the genome of a bacterial species selected from the group consisting of Francisella tularensis 1, Prevotella albensis, Lachnospiraceae bacterium MC2017 1, Butyrivibrio proteoclasticus, Peregrinibacteria bacterium GW2011_GWA2_33_10, Parcubacteria bacterium GW2011_GWC2_44_17, Smithella sp. SCADC, Acidaminococcus sp. BV3L6, Lachnospiraceae bacterium MA2020, Candidatus Methanoplasma termitum, Eubacterium eligens, Moraxella bovoculi 237, Leptospira inadai, Lachnospiraceae bacterium ND2006, Porphyromonas crevioricanis 3, Prevotella disiens and Porphyromonas macacae; or
(b) a Cas12a nuclease selected from the group consisting of LbCas12a, AsCas12a, FnCas12a, and a deactivated Cas12a nuclease; or
(c) a Cas12a nuclease having at least 80% sequence identity with a sequence selected from the group consisting of SEQ ID NOs:11, 107-138, 172, 204-221, and 222; or
(d) a Cas12a nuclease variant selected from the group consisting of (1) a variant LbCpf1 that differs from a wild-type LbCpf1 sequence (SEQ ID NO:135) in containing at least one point mutation selected from the group consisting of G309P, Y312F, M4741, D523N, Q531K, C930A, D937N, V954F/Q, M975L, A984E, I994L, T1006K, I1014V, V1055N/D, L1065F/Y, Y1180F, V1209G, I1229L, V801I, Y802I, D850A, E943A, and D1198A; (2) a variant AsCpf1 that differs from a wild-type AsCpf1 sequence (SEQ ID NO:134) in containing at least one point mutation selected from the group consisting of L320P, V980A, Q987N, T1004F/Q, K1035E, T1057K, D1107N, F1117Y, N1291L, D908A, E993A, and D1263A; (3) a variant FnCpf1 that differs from a wild-type FnCpf1 sequence (SEQ ID NO:172) in containing at least one point mutation selected from the group consisting of I339P, L342F, Q588K, F1017Q, K1047E, N1118D, F1128Y, L867I, D917A, E1006A, and D1255A; and (4) a variant ObCsm1 sequence that differs from a wildtype ObCsm1 sequence (SEQ ID NO:137) in containing at least one point mutation selected from the group consisting of K382N, Q393K, S925A, E933N, K943F/Q, K972L, K1064G, P670I, N671I, D727A, E939A, and D1053A.

21. A method of increasing the efficiency of editing a genetic locus by a Cas12a ribonucleoprotein that includes a Cas12a nuclease and a Cas12a crRNA, the method comprising:
providing to the Cas12a ribonucleoprotein a Cas12a tracrRNA of between about 60 to about 100 nucleotides in length that has at least 50% complementarity to the sequence of the Cas12a crRNA,
whereby the efficiency of the editing of the genetic locus is increased, compared to that obtained in a control method where the Cas12a ribonucleoprotein is provided without the Cas12a tracrRNA.

22. The method of claim 19, wherein the Cas12a tracrRNA is provided:
(a) in a molar excess, relative to the Cas12a nuclease; or
(b) in a molar amount that is at least 10-fold greater than the molar amount of the Cas12a nuclease.

23. The method of claim 19, wherein the Cas12a nuclease is:
(a) a Cas12a nuclease identified from the genome of a bacterial species selected from the group consisting of Francisella tularensis 1, Prevotella albensis, Lachnospiraceae bacterium MC2017 1, Butyrivibrio proteoclasticus, Peregrinibacteria bacterium GW2011_GWA2_33_10, Parcubacteria bacterium GW2011_GWC2_44_17, Smithella sp. SCADC, Acidaminococcus sp. BV3L6, Lachnospiraceae bacterium MA2020, Candidatus Methanoplasma termitum, Eubacterium eligens, Moraxella bovoculi 237, Leptospira inadai, Lachnospiraceae bacterium ND2006, Porphyromonas crevioricanis 3, Prevotella disiens and Porphyromonas macacae; or
(b) a Cas12a nuclease selected from the group consisting of LbCas12a, AsCas12a, FnCas12a, and a deactivated Cas12a nuclease; or
(c) a Cas12a nuclease having at least 80% sequence identity with a sequence selected from the group consisting of SEQ ID NOs:11, 107-138, 172, 204-221, and 222; or
(d) a Cas12a nuclease variant selected from the group consisting of (1) a variant LbCpf1 that differs from a wild-type LbCpf1 sequence (SEQ ID NO:135) in containing at least one point mutation selected from the group consisting of G309P, Y312F, M4741, D523N, Q531K, C930A, D937N, V954F/Q, M975L, A984E, I994L, T1006K, I1014V, V1055N/D, L1065F/Y, Y1180F, V1209G, I1229L, V801I, Y802I, D850A, E943A, and D1198A; (2) a variant AsCpf1 that differs from a wild-type AsCpf1 sequence (SEQ ID NO:134) in containing at least one point mutation selected from the group consisting of L320P, V980A, Q987N, T1004F/Q, K1035E, T1057K, D1107N, F1117Y, N1291L, D908A, E993A, and D1263A; (3) a variant FnCpf1 that differs from a wild-type FnCpf1 sequence (SEQ ID NO:172) in containing at least one point mutation selected from the group consisting of I339P, L342F, Q588K, F1017Q, K1047E, N1118D, F1128Y, L867I, D917A, E1006A, and D1255A; and (4) a variant ObCsm1 sequence that differs from a wildtype ObCsm1 sequence (SEQ ID NO:137) in containing at least one point mutation selected from the group consisting of K382N, Q393K, S925A, E933N, K943F/Q, K972L, K1064G, P670I, N671I, D727A, E939A, and D1053A.

24. A method of producing a eukaryotic cell comprising a modification of a genetic locus of interest comprising (i) delivering the composition of claim 13 to the genetic locus of interest, wherein the spacer sequence hybridizes with a target sequence located in the genetic locus of interest of the eukaryotic cell and whereby the composition introduces the modification into the genetic locus of interest.

25. The method of claim 24, further comprising isolating the eukaryotic cell comprising the modification of the genetic locus of interest.

26. The method of claim 24, further comprising propagating the eukaryotic cell comprising the modification of the genetic locus of interest.

27. The method of claim 24, further comprising introducing the eukaryotic cell comprising the modification of a genetic locus of interest into a host organism.

28. The method of claim 24, further comprising regenerating the eukaryotic cell comprising the modification of a genetic locus of interest into an organism comprising the modification of the locus of interest.

29. The method of claim 28, wherein the organism is a plant, optionally wherein the plant is a maize, soybean, wheat, rice, cotton, or Brassica sp. plant, and optionally further comprising propagating the plant or harvesting seed therefrom.

30. The method of claim 24, wherein the modification in selected from the group consisting of an insertion of one or more nucleotides, a deletion of one or more nucleotides, or a substitution of one or more nucleotides

31. The method of claim 24, wherein the eukaryotic cell is a non-human mammalian cell, a plant cell, or a fungal cell.

32. The method of claim 31, wherein the eukaryotic cell is an isolated cell an in vitro axenic culture.

33. The method of claim 32, wherein the isolated cell is a human cell.
